(19) United States
(12) Patent Application Publication
(10) Pub. No.: US 2009/0075327 A1
(43) Pub. Date: Mar. 19, 2009

(54) Methods for improving secondary metabolite production in fungi

(76) Inventors: Robert Busby, Weymouth, MA (US); Brian Cali, Arlington, MA (US); Peter Hecht, Newton, MA (US); Doug Holtzman, Jamaica Plan, MA (US); Kevin Madden, Charlestown, MA (US); Mary Maxon, Somerville, MA (US); Todd Milne, Brookline, MA (US); Thea Norman, Belmont, MA (US); John Royer, Lexington, MA (US); Sofie Salama, Boston, MA (US); Amir Sherman, Boston, MA (US); Jeff Silva, Beverly, MA (US); Eric Summers, Brookline, MA (US)

Correspondence Address: FISH & RICHARDSON PC, P.O. BOX 1022, MINNEAPOLIS, MN, 55440-1022, US

(21) Appl. No.: 09/800,863

(22) Filed: Mar. 7, 2001

Related U.S. Application Data
(62) Division of application No. 09/487,558, filed on Jan. 19, 2000, now Pat. No. 6,949,356.
(60) Provisional application No. 60/160,587, filed on Oct. 20, 1999.

(51) Int. Cl. C12P 37/00; C12P 17/08; C12N 1/18; C12N 1/16

(52) U.S. Cl. 435/43; 435/484; 435/254.3; 435/124

(57) ABSTRACT

The invention relates to the production of secondary metabolites by fungi. More particularly, the invention relates to improvement of production of commercially important secondary metabolites by fungi. The invention provides methods for improving secondary metabolite production in a fungus, comprising modulating the expression of a gene involved in regulation of secondary metabolite production.

### BACKGROUND OF THE INVENTION

[0001] 1. Field of the Invention

[0002] The invention relates to the production of secondary metabolites by fungi. More particularly, the invention relates to improvement of production of commercially important secondary metabolites by fungi.

[0003] 2. Summary of the Related Art

[0004] Secondary metabolite production by various fungi has been an extremely important source of a variety of therapeutically significant pharmaceuticals. B-lactam antibacterials such as penicillin and cephalosporin are produced by Penicillium chrysogenum and Acremonium chrysogenum, respectively, and these compounds are by far the most frequently used antibacterials (reviewed in Luengo and Penalva, Prog. Ind. Microbiol. 29: 603-38 (1994); Jensen and Demain, Biotechnology 28: 239-68 (1995); Brakhage, Microbiol. Mol. Biol. Rev. 62: 547-85 (1998)). Cyclosporin A, a member of a class of cyclic undecapeptides, is produced by Tolypocladium inflatum. Cyclosporin A dramatically reduces morbidity and increases survival rates in transplant patients (Borel, Prog. Allergy 38: 9-18 (1986)). In addition, several fungal secondary metabolites are cholesterol lowering drugs, including lovastatin that is made by Aspergillus terreus and several other fungi (Alberts et al., Proc. Natl. Acad. Sci. USA 77: 3957-3961 (1980)). These and many other fungal secondary metabolites have contributed greatly to health care throughout the world (see Demain, Ciba Found Symp 171: 3-16 (1992); Bentley, Crit. Rev. Biotechnol. 19: 1-40 (1999)).

[0005] Unfortunately, many challenges are encountered between the detection of a secondary metabolite activity to production of significant quantities of pure drug. Thus, efforts have been made to improve the production of secondary metabolites by fungi. Some of these efforts have attempted to improve production by modification of the growth medium or the bioreactor used to carry out the fermentation. Buckland et al., in Topics in Industrial Microbiology: Novel Microbial products for Medicine and Agriculture, pp. 161-169, Elsevier, Amsterdam (1989) discloses improved lovastatin production by modification of carbon source and also teaches the superiority of a hydrofoil axial flow impeller in the bioreactor. Other efforts have involved strain improvements, either through re-isolation or random mutagenesis. Agathos et al., J. Ind. Microbiol. 1: 39-48 (1986), teaches that strain improvement and process development together resulted in a ten-fold increase in cyclosporin A production. While important, studies of these types have still left much room for improvement in the production of secondary metabolites.

[0006] More recently, strains have been improved by manipulation of the genes encoding the biosynthetic enzymes that catalyze the reactions required for production of secondary metabolites. Penalva et al., Trends Biotechnol. 16: 483-489 (1998) discloses that production strains of P. chrysogenum have increased copy number of the penicillin synthesis structural genes. Other studies have modulated expression of other biosynthetic enzyme-encoding genes, thereby affecting overall metabolism in the fungus. Mingo et al., J. Biol. Chem. 21: 14545-14550 (1999), demonstrate that disruption of phacA, a gene required for phenylacetate catabolism in A. nidulans, leads to increased penicillin production, probably by allowing increased availability of phenylacetate for secondary metabolism. Similarly, disruption of the gene encoding aminoadipate reductase in P. chrysogenum increased penicillin production, presumably by eliminating competition for the substrate alpha-aminoadipate (Casquiero et al., J. Bacteriol. 181: 1181-1188 (1999)).

[0007] Thus, genetic manipulation holds promise for improving production of secondary metabolites. Genetic manipulation to increase the activity of biosynthetic enzymes for secondary metabolite production or to decrease the activity of competing biosynthetic pathways has proven effective for improving production. Maximum benefit might be achieved by combining several strategies of manipulation. For example, modulating the expression of genes that regulate the biosynthetic enzyme-encoding genes might improve production. In addition, genetic manipulation could be used to impact upon the challenges that are encountered in the fermentor run or downstream processing (e.g. energy cost, specific production of desired metabolite, maximal recovery of metabolite, cost of processing waste from fermentations). There is, therefore, a need for methods for improving secondary metabolite production in a fungus, comprising modulating the expression of a gene involved in regulation of secondary metabolite production. Ideally, such methods should be able to provide a means to modulate parameters important in production of secondary metabolites, including, yield, productivity, efflux/excretion, production of side products or non-desired secondary metabolites, strain characteristics such as morphology, conditional lysis, or resistance to the deleterious effects of exposure to a secondary metabolite.

### BRIEF SUMMARY OF THE INVENTION

[0008] The invention provides methods for improving secondary metabolite production in a fungus, comprising modulating the expression of a gene involved in regulation of secondary metabolite production. The methods according to the invention provide increased yield, increased productivity, increased efflux/excretion, decreased production of side products or non-desired secondary metabolites, altered strain characteristics and/or conditional lysis, or increased resistance to the deleterious effects of exposure to a secondary metabolite.

[0009] The several aspects of the methods according to the invention are preferably achieved by overexpression of regulatory genes, expression of dominant mutant variants of regulatory genes, use of peptide activators or inhibitors of regulatory gene function, use of small molecule activators or inhibitors of regulatory gene function, and conditional expression of regulatory genes. These factors preferably are or modulate transcription factors, transmembrane transporters, proteins that mediate secretion, kinases, G-proteins, cell surface receptors, GTPase activating proteins, guanine nucleotide exchange factors, phosphatases, proteases, phosphodiesterases, bacterial protein toxins, importins, RNA-binding proteins, SCF complex components, adherins, or biosynthetic pathways.

[0010] The invention further provides for achieving the aspects described in the invention by combinatorial manipulation. Combinatorial manipulation is the simultaneous use of multiple methods and/or multiple factors to achieve the aspects of the invention. Methods for achieving the aspects of the invention are preferably by the overexpression of regulatory genes, expression of dominant mutant variants of regulatory genes, use of peptide activators or inhibitors, use of small molecule activators or inhibitors, and conditional expression of regulatory genes. The preferred factors are as described above.

[0011] The invention further provides genetically modified fungi, wherein the genetically modified fungi have an ability to produce secondary metabolites and the ability of the genetically modified fungus to produce secondary metabolites has been improved by any of the methods according to the invention.

[0012] The invention also provides a method for making a secondary metabolite, the method comprising culturing a genetically modified fungus according to the invention under conditions suitable for the production of secondary metabolites.

### BRIEF DESCRIPTION OF THE DRAWINGS

[0013] FIG. 1 shows the ability of PUMP1 (AAD34558) from Aspergillus terreus to confer lovastatin resistance to a yeast strain.

[0014] FIG. 2 shows that yeast genetics and genomics can provide insight into mechanisms for production of secondary metabolites. Arrows indicate which genes or gene products act on other genes or gene products, and dotted lines indicate homologous proteins. This figure demonstrates that yeast proteins that regulate the yeast invasion response have homologues in filamentous fungi that regulate the production of secondary metabolites, such as penicillin. Furthermore, the genomic tools and molecular genetics of Saccharomyces cerevisiae may facilitate the understanding of pathways that regulate secondary metabolism in other fungi.

### DETAILED DESCRIPTION OF THE PREFERRED EMBODIMENTS

[0015] The invention relates to the production of secondary metabolites by fungi. More particularly, the invention relates to improvement of production of commercially important secondary metabolites by fungi. The references cited herein evidence the level of knowledge in the field and are therefore incorporated by reference in their entirety. In the event of a conflict between a cited reference and the present specification, the latter shall prevail.

[0016] The invention provides methods for improving secondary metabolite production in a fungus, comprising modulating the expression of a gene involved in regulation of secondary metabolite production. In certain embodiments, the methods comprise modulating the expression of more than one gene involved in regulation of secondary metabolite production.

[0017] In a first aspect, the invention provides methods for improving production of a secondary metabolite by a fungus by increasing the yield of the secondary metabolite produced by the fungus. The methods according to this aspect of the invention comprise modulating the expression of a gene involved in regulation of secondary metabolite production in a manner that improves the yield of the secondary metabolite.

[0018] Preferably, for this aspect of the invention, when the secondary metabolite is isopenicillin N, then the modulation is not mediated by the transcription factor CPCR1; when the secondary metabolite is sterigmatocystin, then the modulation is not through AflR, FadA, or FluG; when the secondary metabolite is aflatoxin, then the modulation is not through AflR; when the secondary metabolite is penicillin and the fungus is Aspergillus nidulans, then the modulation is not through mutations that result in expression of truncated forms of PacC or constitutively active forms of FadA; when the gene involved in regulation of secondary metabolite production is from Saccharomyces cerevisiae, then the modulation is not through decreased activity or expression of Bem2, Hog1, Ira1, Rim15, Sfl1, Srb11, Ssd1, Swi4, Tpk3 or though increased activity or expression of Afl1, Cdc25, Dhh1, Hap4, Inv11, Inv13, Inv5, Inv7, Inv9, Mcm1, Mep2, Mga1, Msn1, Msn5, Mss11, Pet9, Pho23, Ptc1, Rim101, Rim13, Rim9, Snf8, Stp22, Tpk2, Vps28, Vps36, or Ypr1.

[0019] As used for all aspects of the invention, the term “improving production of a secondary metabolite” means to positively impact upon one or more of the variables that affect the process of production of secondary metabolites in a fungal fermentation. These variables include, without limitation, amount of secondary metabolite being produced, the volume required for production of sufficient quantities, the cost of raw materials and energy, the time of fermentor run, the amount of waste that must be processed after a fermentor run, the specific production of the desired metabolite (both in total amounts and as a fraction of all secondary metabolites and side products made by the fungus), the percent of produced secondary metabolite that can be recovered from the fermentation broth, and the resistance of an organism producing a secondary metabolite to possible deleterious effects of contact with the secondary metabolite. Also for all aspects, the term “secondary metabolite” means a compound, derived from primary metabolites, that is produced by an organism, is not a primary metabolite, is not ethanol or a fusel alcohol, and is not required for growth under standard conditions. Secondary metabolites are derived from intermediates of many pathways of primary metabolism. These pathways include, without limitation, pathways for biosynthesis of amino acids, the shikimic acid pathway for biosynthesis of aromatic amino acids, the polyketide biosynthetic pathway from acetyl coenzyme A (CoA), the mevalonic acid pathway from acetyl CoA, and pathways for biosynthesis of polysaccharides and peptidopolysaccharides. Collectively, secondary metabolism involves all primary pathways of carbon metabolism (Fungal Physiology, Chapter 9 pp 246-274 ed DH Griffin (1994)). “Secondary metabolites” also include intermediate compounds in the biosynthetic pathway for a secondary metabolite that are dedicated to the pathway for synthesis of the secondary metabolite. “Dedicated to the pathway for synthesis of the secondary metabolite” means that once the intermediate is synthesized by the cell, the cell will not convert the intermediate to a primary metabolite. “Intermediate compounds” also include secondary metabolite intermediate compounds which can be converted to useful compounds by subsequent chemical conversion or subsequent biotransformation. As such, providing improved availability of such intermediate compounds would still lead to improved production of the ultimate useful compound, which itself may be referred to herein as a secondary metabolite. The yeast Saccharomyces cerevisiae is not known to produce secondary metabolites. The term “primary metabolite” means a natural product that has an obvious role in the functioning of almost all organisms. Primary metabolites include, without limitation, compounds involved in the biosynthesis of lipids, carbohydrates, proteins, and nucleic acids. The term “increasing the yield of the secondary metabolite” means increasing the quantity of the secondary metabolite present in the total fermentation broth per unit volume of fermentation broth.

[0020] A “gene involved in regulation of secondary metabolite production” is a gene, other than a gene encoding a biosynthetic enzyme for the secondary metabolite to be produced, which modulates secondary metabolite production involving yield, productivity, efflux/excretion, production of side products or non-desired secondary metabolites, strain characteristics and/or conditional lysis, or resistance to the deleterious effects of exposure to a secondary metabolite. A “biosynthetic enzyme for the secondary metabolite to be produced” is a molecule that catalyzes the conversion of a substrate to a product, including an intermediate product, in the biosynthetic pathway for the secondary metabolite for which production is being improved. An alternative term, “biosynthetic enzyme”, as used herein refers to a molecule that catalyzes the conversion of a substrate to a product, including an intermediate product, in a biosynthetic pathway other than the biosynthetic pathway for the secondary metabolite for which production is being improved.

[0021] As used for all aspects of the invention, the term “modulating the expression of a gene” means affecting the function of a gene's product, preferably by increasing or decreasing protein activity through mutation, creating a new protein activity through mutation; increasing or decreasing transcription, increasing or decreasing translation, increasing or decreasing post-translational modification, altering intracellular localization, increasing or decreasing translocation from one cellular location to another, increasing or decreasing protein activity by interaction of the protein with another molecule, or creating a new protein activity by interaction of the protein with another molecule. In some cases, such modulation is achieved simply by allowing or causing the expression of an exogenously supplied nucleic acid or gene. In some cases other exogenously supplied molecules may mediate the modulation. The modulation is not achieved, however, by simply randomly mutagenizing the fungus, either spontaneously or by chemical means.

[0022] As used for all aspects of the invention, “mutation” means an alteration in DNA sequence, either by site-directed or random mutagenesis. Mutation encompasses point mutations as well as insertions, deletions, or rearrangements.

[0023] As used for all aspects of the invention, “mutant” means an organism containing one or more mutations.

[0024] In certain embodiments of the methods according to this aspect of the invention, the modulation is overexpression of the gene. “Overexpression of the gene” means transcription and/or translation and/or gene product maturation at a rate that exceeds by at least two-fold, preferably at least five-fold, and more preferably at least ten-fold, the level of such expression that would be present under similar growth conditions in the absence of the modulation of expression of the gene. In instances where heterologous genes are being expressed, any level of expression is, by definition, considered overexpression. “Similar growth conditions” means similar sources of nutrients such as carbon, nitrogen, and phosphate, as well as similar pH, partial oxygen pressure, temperature, concentration of drugs or other small molecules, and a similar substrate for growth, whether solid, semi-solid, or liquid. Preferred genes according to this aspect of the invention include, without limitation, AAD34561, AAD34562, abaA, ACE2, ADR1, AFL1, aflR, AFT1, amyR, areA, ASH1, BAP2, BCY1, CAT8, CDC24, CDC25, CDC28, CDC42, CDC55, CLB2, creA, CTS1, CUP9, CYR1, DFG16, DHH1, DPH3, ELM1, facB, FLO1, FLO11, FLO8, FUS3, GCN2, GCN4, GCR1, GCR2, GLN3, GPA1, GPA2, GPR1, GRR1, GTS1, HAP1, HAP4, HIP1, HMS1, HMS2, HOG1, HSL1, HXK2, IME1, IME4, INO2, INV11, INV13, INV16, INV5, INV7, INV9, KSS1, LEU3, lovE, LYS14, MAC1, MCM1, MEP1, MEP2, MET28, MET31, MET4, metR, MGA1, MIG1, MIG2, MSN1, MSN2, MSN4, MSN5, MSS11, MTH1, NPR1, nreB, NRG1, OAF1, pacC, PBS2, PDE2, PET1, PHD1, PHO2, PHO4, PHO85, pkaR, PPR1, PTC1, PUT3, RAS1, RAS2, RGS2, RIM101, RIM13, RIM15, RIM9, ROX1, RRE1, SCH9, sconB, SFL1, SHO19, SHR3, SIN3, SIP4, SKN7, SNF1, SNF2, SNF7, SNF8, SOK2, SRB10, SRB11, SRB8, SRB9, sreA, sreP, SRV2, SSD1, SSN6, SST2, STE11, STE12, STE20, STE50, STE7, STP22, SWI4, SWI6, tamA, TEC1, TPK1, TPK2, TPK3, TUP1, UaY, UGA3, URE2, VPS28, VPS36, WHI3, YMR077c, YNL255c, YPR1, ZAP1, genes encoding bacterial protein toxins, and any fungal homologs of the aforementioned genes.

[0025] In certain embodiments of the methods according to this aspect of the invention, the modulation is expression of a dominant mutation of the gene. A “dominant mutation” is an allele of a gene that encodes a protein capable of changing the phenotype of an organism more than a non-mutated form of the gene. Dominant mutations include, without limitation, mutations that encode a protein capable of changing the phenotype of an organism even when a non-mutant form of this gene (or its homologs) is resident in the organism. Preferred dominant mutations include dominant negative mutations, dominant positive mutations, and dominant neomorphic mutations. A “dominant negative mutation” is a dominant mutation that achieves its phenotypic effect by interfering with some function of the gene or gene product from which it was derived, or from a homolog thereof. A “dominant positive mutation” is a dominant mutation that achieves its phenotypic effect by activating some function of the gene or gene product from which it was derived, or from a homolog thereof. A “dominant neomorphic mutation” is a dominant mutation that achieves the phenotypic effect of providing a novel function to the gene or gene product from which it was derived, or from a homolog thereof. Preferred dominant mutations according to this aspect of the invention include:
[0026] 1. Mutations that result in increased or decreased stability of the transcript of a gene.
[0027] 2. Mutations that result in increased or decreased stability of the product of translation: For example, specific sequences near the amino terminus of a protein have been shown to cause increased or decreased protein stability. Similarly, sequences elsewhere in the protein, such as those required for ubiquitin-dependent degradation, can be mutated to increase the stability of a protein.
[0028] 3. Amino acid substitutions that mimic post-translational modifications: For example, phosphorylation has been demonstrated to positively or negatively regulate the activity of a variety of proteins, including transcription factors and kinases. Phosphorylation most commonly occurs on serine, threonine, and tyrosine residues; in some instances residues such as aspartate and histidine can be phosphorylated. Mutations that mimic constitutive dephosphorylation can be produced by mutating the coding sequence of the phosphorylated residue to the coding sequence of an amino acid that cannot be phosphorylated and does not have a negatively charged side chain (e.g. alanine). Alternatively, substitutions that result in changing serine, threonine, or tyrosine residues to charged amino acids such as glutamate or aspartate can result in an allele that mimics constitutive phosphorylation.
   [0029] Proteolytic cleavage is another post-translational mechanism for regulating the activity of a protein. Mutations that result in truncation of a protein might mimic activation by proteolysis. Mutations that change amino acids required for proteolysis could activate proteins that are negatively regulated by proteolysis.
[0030] 4. Amino acid substitutions that promote or inhibit the binding of small molecules such as ATP, cAMP, GTP or GDP: For example, ATP is a co-factor for many enzymatic reactions, and the nucleotide-binding domains of these proteins are highly conserved. Lysine to arginine substitutions in the nucleotide-binding domain frequently result in inhibition of enzymatic activity. Enzymatically inactive proteins could be dominant negative molecules, acting by sequestering substrates from functional enzymes.
   [0031] cAMP is required for the activation of protein kinase A. Protein kinase A consists of regulatory subunits and catalytic subunits. The binding of cAMP to the negative regulatory subunit relieves its inhibition of the catalytic subunit. Therefore, mutations that prevent cAMP binding could result in constitutive inactivation of protein kinase A.
   [0032] G-proteins are a class of proteins that bind the nucleotides GTP and GDP. The GTP-bound form of these proteins is active, and hydrolysis of GTP to GDP results in the inactivation of the protein. Conserved substitutions can be made to lock G-proteins in either the GTP- or GDP-bound form, thus causing constitutive activation or inactivation.
[0033] 5. Mutations in portions of genes that encode regulatory domains of proteins: For example, many proteins, including kinases, contain regulatory domains that function as mechanisms to control the timing of activation. Mutations in these domains might result in constitutive activation of the kinase. Mutations that result in increased binding to regulatory proteins might result in constitutive inactivation.
   [0034] Regulatory domains include short peptide sequences such as those required for nuclear import or export. Mutations in these sequences would result in constitutive cytoplasmic or nuclear localization, respectively, which could either activate or inhibit signaling.
[0035] 6. Mutations that result in proteins that are capable of binding to an appropriate signaling partner, but the complexes that form are inactive: For example, dimerization of proteins, either homodimers or heterodimers, often is required for signaling; in many instances, short protein sequences are sufficient to promote dimerization. Mutations in functional domains not required for dimerization might result in dominant inhibition; these proteins are capable of binding to and possibly sequestering other signaling molecules into inactive, or partially inactive, complexes.
[0036] 7. Mutations that decrease or increase the targeting of proteins to the appropriate subcellular destination: Short peptide sequences often facilitate the targeting of proteins to specific subcellular locations. For example, short sequences are sufficient to be recognized and modified by fatty acylation, prenylation, or glycosyl-phosphatidylinositol modification. These modifications result in targeting of proteins to membranes. Membrane spanning peptide sequences also have been identified, as have targeting sequences for secretion. In addition, sequences have been identified that target proteins to subcellular locations such as the endoplasmic reticulum, mitochondria, peroxisome, vacuole, nucleus, and lysosome. Mutations that inhibit proper targeting might result in dominant inhibition; these proteins might be capable of binding to and possibly sequestering other signaling molecules from the appropriate subcellular location.
[0037] 8. Mutations that create a new protein function. For example, a mutation in a protein kinase could result in altered substrate specificity, such that the mutated kinase can modulate the activity of pathways that it does not usually regulate.

[0038] In certain embodiments of the methods according to this aspect of the invention, the modulation is mediated by a peptide modulator of gene expression. The term “peptide” means a molecule comprised of a linear array of amino acid residues connected to each other in the linear array by peptide bonds. Such peptides according to the invention may include from about three to about 500 amino acids, and may further include secondary, tertiary or quaternary structures, as well as intermolecular associations with other peptides or other non-peptide molecules. Such intermolecular associations may be through, without limitation, covalent bonding (e.g., through disulfide linkages), chelation, electrostatic interactions, hydrophobic interactions, hydrogen bonding, ion-dipole interactions, dipole-dipole interactions, or any combination of the above. Peptides may be expressed in the cell or supplied exogenously. Preferably, they are provided on a scaffold to increase intracellular stability and to provide conformational constraint. A “scaffold” is a molecule, most frequently a small protein, from which a peptide is displayed; scaffolds are employed to optimize presentation, rigidity, conformational constraint, and potentially intracellular/extracellular localization. Preferred scaffolds include a catalytically inactive version of staphylococcal nuclease. Preferred peptides according to this aspect of the invention include, without limitation, those peptides disclosed in Norman et al., Science 285: 591-595 (1999).

[0039] In certain embodiments of the methods according to this aspect of the invention, the peptide modulator is an activator of gene expression. An “activator of gene expression” is a molecule that causes transcription and/or translation and/or gene product maturation to exceed by at least two-fold, preferably at least five fold, and more preferably at least ten-fold, the level of such expression that would be present under similar growth conditions in the absence of the activator of expression of the gene. “Similar growth conditions” is as used before.

[0040] In certain embodiments of the methods according to this aspect of the invention, the peptide modulator is an inhibitor of gene expression. An “inhibitor of gene expression” is a molecule that causes transcription and/or translation and/or gene product maturation to be reduced by at least two-fold, preferably at least five fold, and more preferably at least ten-fold, the level of such expression that would be present under similar growth conditions in the absence of the inhibitor of expression of the gene. “Similar growth conditions” is as used before.

[0041] In certain embodiments of the methods according to this aspect of the invention, the modulation is mediated by a small molecule modulator of gene expression. In certain embodiments of the methods according to this aspect of the invention, the small molecule modulator is an activator of gene expression. The term “activator of gene expression” is as used before. In certain embodiments of the methods according to this aspect of the invention, the small molecule modulator is an inhibitor of gene expression. The term “inhibitor of gene expression” is as used before. A “small molecule” is a compound with a preferable molecular weight below 1000 daltons.

[0042] In certain embodiments of the methods according to this aspect of the invention, the modulation is conditional expression of the gene. “Conditional expression” of a gene means expression under certain growth conditions, but not under others. Such growth conditions that may be varied include, without limitation, carbon source, nitrogen source, phosphate source, pH, temperature, partial oxygen pressure, the presence or absence of small molecules such as drugs, and the presence or absence of a solid substrate.

[0043] In certain embodiments of the methods according to this aspect of the invention, the gene either encodes a transcription factor or the product that it encodes acts on a transcription factor. As used throughout this specification, the term “the gene acts on” means that the gene or its transcriptional, translational, or post-translationally modified product affects the function of its target (for the remainder of the text, the target is the word or phrase that follows the expression “the gene acts on”), preferably by increasing or decreasing transcription, increasing or decreasing translation, increasing or decreasing post-translational modification, increasing or decreasing protein stability, increasing or decreasing protein translocation, or increasing or decreasing protein function by interaction of the protein with another molecule. A “transcription factor” is a molecule that activates or inhibits transcription. The term “activates transcription” means to cause transcription to exceed by at least two-fold, preferably at least five-fold, and more preferably at least ten-fold, the level of transcription that would be present under similar growth conditions in the absence of the transcription factor. The term “inhibits transcription” means to cause transcription to be reduced by at least two-fold, preferably at least five-fold, and more preferably at least ten-fold, the level of such transcription that would be present under similar growth conditions in the absence of the transcription factor. Preferred transcription factors include, without limitation, transcription factors that modulate the expression of genes involved in the production or response to the small molecule cAMP (preferred examples include, without limitation, Mga1, Msn2, Msn4, Sfl1, and Sok2); transcription factors that function downstream of mitogen-activated protein (MAP) kinase signaling pathways that regulate the yeast invasion response (preferred examples include, without limitation, Mcm1, Ste12, and Tec1); transcription factors that modulate the expression of genes involved in nitrogen regulation (preferred examples include, without limitation, AreA, Gln3, Hms1, Hms2, NreB, TamA, and Uga3); transcription factors that modulate the expression of genes involved in pH regulation in fungi (preferred examples include, without limitation PacC and Rim101); general transcription factors (preferred examples include, without limitation, Sin3, Snf2, Srb8, Srb9, Srb10, Srb11, Ssn6, and Tup1); transcription factors that modulate the expression of genes involved in carbon metabolism (preferred examples include, without limitation, Adr1, Cat8, CreA, FacB, Gcr1, Gcr2, Hap4, Mig1, Mig2, Mth1, Nrg1, Oaf1, and Sip4); heme-dependent transcription factors (preferred examples include, without limitation, Hap1 and Rox1); transcription factors that modulate the expression of genes involved in the uptake of metals (preferred examples include, without limitation, Aft1, Cup9, Mac 1, SreP, SreA, and Zap1); transcription factors that modulate the expression of genes involved in cell-cycle regulation (preferred examples include, without limitation, Skn7, Swi4, and Swi6); transcription factors that modulate the expression of genes involved in invasion (preferred examples include, without limitation, Ash1, Flo8, Gts1, Inv7, Msn1, Mss11, Phd1, and Rre1); transcription factors that modulate the expression of genes involved in amino acid biosynthesis or transport (preferred examples include, without limitation, Gcn4, Leu3, Lys14, Met4, Met28, Met31, MetR, Put3, SconB, and Uga3); transcription factors that modulate the expression of genes involved in phosphate metabolism or transport (preferred examples include, without limitation, Pho2 and Pho4); transcription factors that modulate the expression of genes involved in nucleotide metabolism or transport (preferred examples include, without limitation, Ppr1 and UaY); transcription factors that modulate the expression of genes involved in cell wall processes (preferred examples include, without limitation, Ace2, Swi4, and Swi6); transcription factors that modulate the expression of genes involved in sporulation (preferred examples include, without limitation, Ime1 and Ime4); transcription factors that modulate the expression of genes involved in phospholipid synthesis (preferred examples include, without limitation, Ino2); transcription factors that modulate the expression of genes involved in aflatoxin biosynthesis (preferred examples include, without limitation, AflR); transcription factors that modulate the expression of genes involved in lovastatin biosynthesis (preferred examples include, without limitation, AAD34561 and LovE); and transcription factors that modulate the expression of genes involved in filamentous fungal development (preferred examples include, without limitation, AbaA). The term “general transcription factors” means components involved in the formation of preinitiation complexes at promoters that are regulated by RNA polymerase II. The term “invasion” means a process by which a fungus penetrates, digs, adheres to, or attaches to a substrate.

[0044] In certain embodiments of the methods according to this aspect of the invention, the gene either encodes a transmembrane transporter or the product that it encodes acts on a transmembrane transporter. A “transmembrane transporter” is a molecule or complex of molecules that facilitates passage of another type of molecule from one side of a cellular membrane to the other side in an energy-dependent or energy-independent manner. “Facilitates passage” means that the number of molecules traversing the membrane is greater than it would have been in the absence of the transmembrane transporter, preferably at least two-fold greater, more preferably at least ten-fold greater, even more preferably at least one hundred-fold greater, and most preferably at least one thousand-fold greater. Preferred classes of transmembrane transporters include, without limitation, proteins of the ATP-binding cassette superfamily, members of the Major Facilitator Superfamily (MFS) that include, without limitation Pump1 and Pump2, P-type ATPases, members of the mitochondrial carrier family (MCF) that include, without limitation, Pet9 and AAD34562, ion channels, permeases that include, without limitation, Bap2, Hip1, Mep1, and Mep2; and components that transport sugars, ions, or metals.

[0045] In certain embodiments of the methods according to this aspect of the invention, the gene either encodes a kinase or the product that it encodes acts on a kinase. A “kinase” is a molecule that phosphorylates a protein, a lipid, a nucleic acid, a carbohydrate, or any other substrate that is capable of being phosphorylated. Preferred kinases include, without limitation, Cdc28, Elm1, Fus3, Gcn2, Hog1, Hsl1, Hxk2, Kss1, Pbs2, Pho85, Rim15, Ste7, Sch9, Snf1, Ste11, Ste20, Tpk1, Tpk2, and Tpk3.

[0046] In certain embodiments of the methods according to this aspect of the invention, the gene either encodes a G-protein or the product that it encodes acts on a G-protein. A “G-protein” is a guanyl-nucleotide binding protein. Preferred G-proteins include, without limitation Cdc42, FadA, Gpa1, Gpa2, Ras1, and Ras2.

[0047] In certain embodiments of the methods according to this aspect of the invention, the gene either encodes a cell surface receptor or the product that it encodes acts on a cell surface receptor. A “cell surface receptor” is a molecule that resides at the plasma membrane, binds an extracellular signaling molecule, and transduces this signal to propagate a cellular response. Preferred cell surface receptors include, without limitation, G-protein coupled receptors. Preferred G-protein coupled receptors include, without limitation, Gpr1.

[0048] In certain embodiments of the methods according to this aspect of the invention, the gene either encodes a GTPase activating protein or the product that it encodes acts on a GTPase activating protein. A “GTPase activating protein” is a molecule that promotes the hydrolysis of GTP bound to a G-protein. GTP-activating proteins often negatively regulate the activity of G-proteins. Preferred GTPase activating proteins include, without limitation, RGS family members. “RGS family members” are regulators of G-protein signaling that act upon G-protein coupled receptors. Preferred RGS family members include, without limitation, FlbA, Rgs2, and Sst2.

[0049] In certain embodiments of the methods according to this aspect of the invention, the gene either encodes a guanine nucleotide exchange factor or the product that it encodes acts on a guanine nucleotide exchange factor. A “guanine nucleotide exchange factor” is a molecule that catalyzes the dissociation of GDP from the inactive GTP-binding proteins; following dissociation, GTP can then bind and induce structural changes that activate G-protein signaling. Preferred guanine nucleotide exchange factors include, without limitation, Cdc24 and Cdc25.

[0050] In certain embodiments of the methods according to this aspect of the invention, the gene either encodes a phosphatase or the product that it encodes acts on a phosphatase. A “phosphatase” is a molecule that dephosphorylates a protein, a lipid, a nucleic acid, a carbohydrate, or any other substrate that is capable of being dephosphorylated. Preferred phosphatases include, without limitation, Cdc55 and Ptc1.

[0051] In certain embodiments of the methods according to this aspect of the invention, the gene either encodes a protease or the product that it encodes acts on a protease. A “protease” is a molecule that cleaves one or more amide bonds in a peptide or protein. “Peptide” is as used before. Preferred proteases include, without limitation, Rim13 and LF.

[0052] In certain embodiments of the methods according to this aspect of the invention, the gene either encodes a cyclic nucleotide phosphodiesterase or the product that it encodes acts on a cyclic nucleotide phosphodiesterase. A “cyclic nucleotide phosphodiesterase” is a molecule that catalyzes the hydrolysis of the 3′ phosphate bond of a 3′, 5′, cyclic nucleotide to yield free 5′ nucleotide. Preferred examples of cyclic nucleotide phosphodiesterases include, without limitation, Pde2.

[0053] In certain embodiments of the methods according to this aspect of the invention, the gene either encodes a bacterial protein toxin or the product that it encodes acts on a bacterial protein toxin. A “bacterial protein toxin” is protein produced by a bacterium, as part of the pathogenesis of the bacterial organism, to kill or impair the biological function of the host organism. Bacterial protein toxins exhibit a wide-variety of biochemical and enzymatic activities including those of adenylate cyclases, ADP-ribosyltransferases, phospholipases, and proteases. Expression of bacterial protein toxins in fungi could result in increased production of secondary metabolites. Preferred bacterial protein toxins include, without limitation, Anthrax toxin edema factor (EF; Bacillus anthracis), Anthrax toxin lethal factor (LF; Bacillus anthracis), adenylate cyclase toxin (Bordetella pertussis), Cholera enterotoxin (Vibrio cholerae), LT toxin (Escherichia coli), ST toxin (E. coli), Shiga toxin (Shigella dysenteriae), Perfringens enterotoxin (Clostridium perfringens), Botulinum toxin (Clostridium botulinum), Tetanus toxin (Clostridium tetani), Diphtheria toxin (Corynebacterium diphtheriae), Exotoxin A (Pseudomonas aeruginosa), Exoenzyme S (P. aeruginosa), Pertussis toxin (Bordetella pertussis), alpha and epsilon toxins (C. perfringens), lethal toxin (LT; Clostridium sordellii), toxins A and B (Clostridium dificile), and phospholipase C (Clostridium bifermentans).

[0054] In certain embodiments of the methods according to this aspect of the invention, the gene either encodes an importin protein or the product that it encodes acts on an importin protein. An “importin” protein is a molecule that functions in the translocation of proteins from the nucleus to the cytosol or from the cytosol to the nucleus. Preferred examples of importin proteins include, without limitation, Msn5.

[0055] In certain embodiments of the methods according to this aspect of the invention, the gene either encodes a RNA-binding protein or the product that it encodes acts on a RNA-binding protein. Preferred examples of RNA-binding proteins include, without limitation, Dhh1 and Whi3.

[0056] In certain embodiments of the methods according to this aspect of the invention, the gene either encodes a component of a SCF complex or the product that it encodes acts on a component of a SCF complex. A “component of a SCF complex” is a molecule in a multi-protein aggregate that targets various substrates involved in the G1 to S phase cell cycle transition for ubiquitin-dependent degradation. Preferred examples of components of a SCF complex include, without limitation, Grr1.

[0057] In certain embodiments of the methods according to this aspect of the invention, the gene either encodes or the gene product acts on a biosynthetic enzyme. In certain embodiments of the methods according to this aspect of the invention, the gene acts on biosynthetic enzyme for the secondary metabolite to be produced. The terms “biosynthetic enzyme” and “biosynthetic enzyme for the secondary metabolite to be produced” are as used before.

[0058] In certain embodiments of the methods according to this aspect of the invention, the secondary metabolite is an anti-bacterial. An “anti-bacterial” is a molecule that has cytocidal or cytostatic activity against some or all bacteria. Preferred anti-bacterials include, without limitation, β-lactams. Preferred β-lactams include, without limitation, penicillins and cephalosporins and biosynthetic intermediates thereof. Preferred penicillins and biosynthetic intermediates include, without limitation, isopenicillin N, 6-aminopenicillanic acid (6-APA), penicillin G, penicillin N, and penicillin V. Preferred cephalosporins and biosynthetic intermediates include, without limitation, deacetoxycephalosporin V (DAOC V), deacetoxycephalosporin C (DAOC), deacetylcephalosporin C (DAC), 7-aminodeacetoxycephalosporanic acid (7-ADCA), cephalosporin C, 7-B-(5-carboxy-5-oxopentanamido)-cephalosporanic acid (keto-AD-7ACA), 7-B-(4-carboxybutanamido)-cephalosporanic acid (GL-7ACA), and 7-aminocephalosporanic acid (7ACA).

[0059] In certain embodiments of the methods according to this aspect of the invention, the secondary metabolite is an anti-hypercholesterolemic or a biosynthetic intermediate thereof. An “anti-hypercholesterolemic” is a drug administered to a patient diagnosed with elevated cholesterol levels, for the purpose of lowering the cholesterol levels. Preferred anti-hypercholesterolemics include, without limitation, lovastatin, mevastatin, simvastatin, and pravastatin.

[0060] In certain embodiments of the methods according to this aspect of the invention, the secondary metabolite is an immunosuppressant or a biosynthetic intermediate thereof. An “immunosuppressant” is a molecule that reduces or eliminates an immune response in a host when the host is challenged with an immunogenic molecule, including immunogenic molecules present on transplanted organs, tissues or cells. Preferred immunosuppressants include, without limitation, members of the cyclosporin family and beauverolide L. Preferred cyclosporins include, without limitation, cyclosporin A and cyclosporin C.

[0061] In certain embodiments of the methods according to this aspect of the invention, the secondary metabolite is an ergot alkaloid or a biosynthetic intermediate thereof. An “ergot alkaloid” is a member of a large family of alkaloid compounds that are most often produced in the sclerotia of fungi of the genus Claviceps. An “alkaloid” is a small molecule that contains nitrogen and has basic pH characteristics. The classes of ergot alkaloids include clavine alkaloids, lysergic acids, lysergic acid amides, and ergot peptide alkaloids. Preferred ergot alkaloids include, without limitation, ergotamine, ergosine, ergocristine, ergocryptine, ergocornine, ergotaminine, ergosinine, ergocristinine, ergocryptinine, ergocominine, ergonovine, ergometrinine, and ergoclavine.

[0062] In certain embodiments of the methods according to this aspect of the invention, the secondary metabolite is an inhibitor of angiogenesis or a biosynthetic intermediate thereof. An “angiogenesis inhibitor” is a molecule that decreases or prevents the formation of new blood vessels. Angiogenesis inhibitors have proven effective in the treatment of several human diseases including, without limitation, cancer, rheumatoid arthritis, and diabetic retinopathy. Preferred inhibitors of angiogenesis include, without limitation, fumagillin and ovalicin.

[0063] In certain embodiments of the methods according to this aspect of the invention, the secondary metabolite is a glucan synthase inhibitor or a biosynthetic intermediate thereof. A “glucan synthase inhibitor” is a molecule that decreases or inhibits the production of 1,3-β-D-glucan, a structural polymer of fungal cell walls. Glucan synthase inhibitors are a class of antifungal agents. Preferred glucan synthase inhibitors include, without limitation, echinocandin B, pneumocandin B, aculeacin A, and papulacandin.

[0064] In certain embodiments of the methods according to this aspect of the invention, the secondary metabolite is a member of the gliotoxin family of compounds or a biosynthetic intermediate thereof. The “gliotoxin family of compounds” are related molecules of the epipolythiodioxopiperazine class. Gliotoxins display diverse biological activities, including, without limitation, antimicrobial, antifungal, antiviral, and immunomodulating activities. Preferred members of the “gliotoxin family of compounds” include, without limitation, gliotoxin and aspirochlorine.

[0065] In certain embodiments of the methods according to this aspect of the invention, the secondary metabolite is a fungal toxin or a biosynthetic intermediate thereof. A “fungal toxin” is a compound that causes a pathological condition in a host, either plant or animal. Fungal toxins could be mycotoxins present in food products, toxins produced by phytopathogens, toxins from poisonous mushrooms, or toxins produced by zoopathogens. Preferred fungal toxins include, without limitation, aflatoxins, patulin, zearalenone, cytochalasin, griseofulvin, ergochrome, cercosporin, marticin, xanthocillin, coumarins, tricothecenes, fusidanes, sesterpenes, amatoxins, malformin A, phallotoxins, pentoxin, HC toxin, psilocybin, bufotenine, lysergic acid, sporodesmin, pulcheriminic acid, sordarins, fumonisins, ochratoxin A, and fusaric acid.

[0066] In certain embodiments of the methods according to this aspect of the invention, the secondary metabolite is a modulator of cell surface receptor signaling or a biosynthetic intermediate thereof. The term “cell surface receptor” is as used before. Modulators of cell surface receptor signaling might function by one of several mechanisms including, without limitation, acting as agonists or antagonists, sequestering a molecule that interacts with a receptor such as a ligand, or stabilizing the interaction of a receptor and molecule with which it interacts. Preferred modulators of cell surface signaling include, without limitation, the insulin receptor agonist L-783,281 and the cholecystokinin receptor antagonist asperlicin.

[0067] In certain embodiments of the methods according to this aspect of the invention, the secondary metabolite is a plant growth regulator or a biosynthetic intermediate thereof. A “plant growth regulator” is a molecule that controls growth and development of a plant by affecting processes that include, without limitation, division, elongation, and differentiation of cells. Preferred plant growth regulators include, without limitation, cytokinin, auxin, gibberellin, abscisic acid, and ethylene.

[0068] In certain embodiments of the methods according to this aspect of the invention, the secondary metabolite is a pigment or a biosynthetic intermediate thereof. A “pigment” is a substance that imparts a characteristic color. Preferred pigments include, without limitation, melanins and carotenoids.

[0069] In certain embodiments of the methods according to this aspect of the invention, the secondary metabolite is an insecticide or a biosynthetic intermediate thereof. An “insecticide” is a molecule that is toxic to insects. Preferred insecticides include, without limitation, nodulisporic acid.

[0070] In certain embodiments of the methods according to this aspect of the invention, the secondary metabolite is an anti-neoplastic compound or a biosynthetic intermediate thereof. An “anti-neoplastic” compound is a molecule that prevents or reduces tumor formation. Preferred anti-neoplastic compounds include, without limitation, taxol (paclitaxel) and related taxoids.

[0071] In certain embodiments of the methods according to this aspect of the invention, the gene is not AFL1, BEM2, CDC25, DHH1, HOG1, INV11, INV13, INV5, INV7, INV9, IRA1, MCM1, MEP2, MGA1, MSN1, MSN5, MSS11, PET9, PHO23, PTC1, RIM101, RIM13, RIM15, RIM9, SFL1, SNF8, SRB11, SSD1, STP22, SWI4, TPK2, TPK3, VPS28, VPS36, or YPR1. Each of these genes is as described in PCT Publication No. WO99/25865A1

[0072] In certain embodiments of the methods according to this aspect of the invention, the gene is selected from the group consisting of AAD34561, AAD34562, abaA, ACE2, ADR1, AFL1, aflR, AFT1, amyR, areA, ASH1, BAP2, BCY1, CAT8, CDC24, CDC25, CDC28, CDC42, CDC55, CLB2, creA, CTS1, CUP9, CYR1, DFG16, DHH1, DPH3, ELM1, facB, FLO1, FLO11, FLO8, FUS3, GCN2, GCN4, GCR1, GCR2, GLN3, GPA1, GPA2, GPR1, GRR1, GTS1, HAP1, HAP4, HIP1, HMS1, HMS2, HOG1, HSL1, HXK2, IME1, IME4, INO2, INV11, INV13, INV16, INV5, INV7, INV9, KSS1, LEU3, lovE, LYS14, MAC1, MCM1, MEP1, MEP2, MET28, MET31, MET4, metR, MGA1, MIG1, MIG2, MSN1, MSN2, MSN4, MSN5, MSS11, MTH1, NPR1, nreB, NRG1, OAF1, pacC, PBS2, PDE2, PET9, PHD1, PHO2, PHO4, PHO85, pkaR, PPR1, PTC1, PUT3, RAS1, RAS2, RGS2, RIM101, RIM13, RIM15, RIM9, ROX1, RRE1, SCH9, sconB, SFL1, SHO1, SHR3, SIN3, SIP4, SKN7, SNF1, SNF2, SNF7, SNF8, SOK2, SRB10, SRB11, SRB8, SRB9, sreA, sreP, SRV2, SSD1, SSN6, SST2, STE11, STE12, STE20, STE50, STE7, STP22, SWI4, SWI6, tamA, TEC1, TPK1, TPK2, TPK3, TUP1, UaY, UGA3, URE2, VPS28, VPS36, WHI3, YMR077c, YNL255c, YPR1, ZAP1, genes encoding bacterial protein toxins, and any fungal homologs of the aforementioned genes. A “fungal homolog” of a gene is a gene encoding a gene product that is capable of performing at least a portion of the function of the product encoded by the reference gene, and is substantially identical to the reference gene and/or the encoded product. “Substantially identical” means a polypeptide or nucleic acid exhibiting at least 25%, preferably 50%, more preferably 80%, and most preferably 90%, or even 95% identity to a reference amino acid sequence or nucleic acid sequence. For polypeptides, the length of comparison sequences will generally be at least 16 amino acids, preferably at least 20 amino acids, more preferably at least 25 amino acids, and most preferably 35 amino acids or greater. For nucleic acids, the length of comparison sequences will generally be at least 50 nucleotides, preferably at least 60 nucleotides, more preferably at least 75 nucleotides, and most preferably 110 nucleotides or greater.

[0073] Sequence identity is typically measured using sequence analysis software (for example, Sequence Analysis Software Package of the Genetics Computer Group, University of Wisconsin Biotechnology Center, 1710 University Avenue, Madison Wis. 53705, BLAST, BEAUTY, or PILEUP/PRETTYBOX programs). Most preferably, BLAST is used. Such software matches identical or similar sequences by assigning degrees of homology to various substitutions, deletions, and/or other modifications. Conservative substitutions typically include substitutions within the following group: glycine, alanine, valine, isoleucine, leucine; aspartic acid, glutamic acid, asparagine, glutamine; serine, threonine; lysine, arginine; and phenylalanine, tyrosine.

[0074] In certain embodiments of the methods according to this aspect of the invention, the methods further comprise purifying the secondary metabolite from a culture of the fungus. “Purifying” means obtaining the secondary metabolite in substantially pure form. “Substantially pure” means comprising at least 90%, more preferably at least 95%, and most preferably at least 99%, of the purified composition on a weight basis.

[0075] In a second aspect, the invention provides methods for improving production of a secondary metabolite by a fungus by increasing productivity of the secondary metabolite in the fungus, the methods comprising modulating the expression of a gene involved in regulation of secondary metabolite production in a manner that improves the productivity of the secondary metabolite. “Increasing productivity” means to increase the quotient for the equation: concentration of secondary metabolite divided by the product of time of fermentor run, fermentation volume, and grams of dry cell weight of biomass (Productivity=concentration metabolite/(time*volume*gDCW)). Significant advantages that might result from increasing productivity include, without limitation, a decrease in fermentor run time, a decrease in the size of fermentor required for production of equivalent amounts of secondary metabolite, or a decrease in the biomass required for production. Collectively, improvements in productivity can reduce both fixed costs (capital equipment expenses such as fermentor and production facility size, for example) and variable costs (including, but not limited to, decreased waste stream during downstream processing, decreased energy and labor costs, and decreased cost of bulk ingredients). Preferably, such increased productivity is by at least ten percent, more preferably at least 50 percent, and most preferably at least two-fold.

[0076] Preferably, for this aspect of the invention, when the secondary metabolite is isopenicillin N, then the modulation is not mediated by the transcription factor CPCR1; when the secondary metabolite is sterigmatocystin, then the modulation is not through AflR, FadA, or FluG; when the secondary metabolite is aflatoxin, then the modulation is not through AflR; when the secondary metabolite is penicillin and the fungus is Aspergillus, then the modulation is not through mutations that result in expression of truncated forms of PacC or constitutively active forms of FadA; when the gene involved in regulation of secondary metabolite production is from Saccharomyces cerevisiae, then the modulation is not through decreased activity or expression of Bem2, Hog1, Ira1, Rim15, Sfl1, Srb11, Ssd1, Swi4, Tpk3 or though increased activity or expression of Afl1, Cdc25, Dhh1, Hap4, Inv11, Inv13, Inv5, Inv7, Inv9, Mcm1, Mep2, Mga1, Msn1, Msn5, Mss11, Pet9, Pho23, Ptc1, Rim101, Rim13, Rim9, Snf8, Stp22, Tpk2, Vps28, Vps36, or Ypr1.

[0077] In certain embodiments of the methods according to this aspect of the invention, the modulation is overexpression of the gene. “Overexpression of the gene” is as used before. Preferred genes according to this aspect of the invention include, without limitation, AAD34561, AAD34562, abaA, ACE2, ADR1, AFL1, aflR, AFT1, amyR, areA, ASH1, BAP2, BCY1, CAT8, CDC24, CDC25, CDC28, CDC42, CDC55, CLB2, creA, CTS1, CUP9, CYR1, DFG16, DHH1, DPH3, ELM1, facB, FLO1, FLO11, FLO8, FUS3, GCN2, GCN4, GCR1, GCR2, GLN3, GPA1, GPA2, GPR1, GRR1, GTS1, HAP1, HAP4, HIP1, HMS1, HMS2, HOG1, HSL1, HXK2, IME1, IME4, INO2, INV11, INV13, INV16, INV5, INV7, INV9, KSS1, LEU3, lovE, LYS14, MAC1, MCM1, MEP1, MEP2, MET28, MET31, MET4, metR, MGA1, MIG1, MIG2, MSN1, MSN2, MSN4, MSN5, MSS11, MTH1, NPR1, nreB, NRG1, OAF1, pacC, PBS2, PDE2, PET9, PHD1, PHO2, PHO4, PHO85, pkaR, PPR1, PTC1, PUT3, RAS1, RAS2, RGS2, RIM101, RIM13, RIM15, RIM9, ROX1, RRE1, SCH10, sconB, SFL1, SHO1, SHR3, SIN3, SIP4, SKN7, SNF1, SNF2, SNF7, SNF8, SOK2, SRB10, SRB11, SRB8, SRB9, sreA, sreP, SRV2, SSD1, SSN6, SST2, STE11, STE12, STE20, STE50, STE7, STP22, SWI4, SWI6, tamA, TEC1, TPK1, TPK2, TPK3, TUP1, UaY, UGA3, URE2, VPS28, VPS36, WHI3, YMR077c, YNL255c, YPR1, ZAP1, genes encoding bacterial protein toxins, and any fungal homologs of the aforementioned genes.

[0078] In certain embodiments of the methods according to this aspect of the invention, the modulation is expression of a dominant mutation of the gene. The term “dominant mutation” is as used before. Preferred dominant mutations according to this aspect of the invention are as used before.

[0079] In certain embodiments of the methods according to this aspect of the invention, the modulation is mediated by a peptide modulator of gene expression. The term “peptide” is as used before. Peptides may be expressed in the cell or supplied exogenously. Preferably, they are provided on a scaffold to increase intracellular stability and to provide conformational constraint. Preferred peptides according to this aspect of the invention include those discussed earlier.

[0080] In certain embodiments of the methods according to this aspect of the invention, the peptide modulator is an activator of gene expression. The term “activator of gene expression” is as used before.

[0081] In certain embodiments of the methods according to this aspect of the invention, the peptide modulator is an inhibitor of gene expression. The term “inhibitor of gene expression” is as used before.

[0082] In certain embodiments of the methods according to this aspect of the invention, the modulation is mediated by a small molecule modulator of gene expression. In certain embodiments of the methods according to this aspect of the invention, the small molecule modulator is an activator of gene expression. The term “activator of gene expression” is as used before. In certain embodiments of the methods according to this aspect of the invention, the small molecule modulator is an inhibitor of gene expression. The term “inhibitor of gene expression” is as used before.

[0083] In certain embodiments of the methods according to this aspect of the invention, the modulation is conditional expression of the gene. The term “conditional expression” of a gene is as used before.

[0084] In certain embodiments of the methods according to this aspect of the invention, the gene either encodes a transcription factor or the product that it encodes acts on a transcription factor. The term “the gene acts on” is as used before. The term “transcription factor” is as used before. Preferred transcription factors include, without limitation, transcription factors that modulate the expression of genes involved in the production or response to the small molecule cAMP (preferred examples include, without limitation, Mga1, Msn2, Msn4, Sfl1, and Sok2); transcription factors that function downstream of mitogen-activated protein (MAP) kinase signaling pathways that regulate the yeast invasion response (preferred examples include, without limitation, Mcm1, Ste12, and Tec1); transcription factors that modulate the expression of genes involved in nitrogen regulation (preferred examples include, without limitation, AreA, Gln3, Hms1, Hms2, NreB, TamA, and Uga3); transcription factors that modulate the expression of genes involved in pH regulation in fungi (preferred examples include, without limitation PacC and Rim101); general transcription factors (preferred examples include, without limitation, Sin3, Snf2, Srb8, Srb9, Srb10, Srb11, Ssn6, and Tup1); transcription factors that modulate the expression of genes involved in carbon metabolism (preferred examples include, without limitation, Adr1, Cat8, CreA, FacB, Gcr1, Gcr2, Hap4, Mig1, Mig2, Mth1, Nrg1, Oaf1, and Sip4); heme-dependent transcription factors (preferred examples include, without limitation, Hap1 and Rox1); transcription factors that modulate the expression of genes involved in the uptake of metals (preferred examples include, without limitation, Aft1, Cup9, Mac1, SreP, SreA, and Zap1); transcription factors that modulate the expression of genes involved in cell-cycle regulation (preferred examples include, without limitation, Skn7, Swi4, and Swi6); transcription factors that modulate the expression of genes involved in invasion (preferred examples include, without limitation, Ash1, Flo8, Gts1, Inv7, Msn1, Mss11, Phd1, and Rre1); transcription factors that modulate the expression of genes involved in amino acid biosynthesis or transport (preferred examples include, without limitation, Gcn4, Leu3, Lys14, Met4, Met28, Met31, MetR, Put3, SconB, and Uga3); transcription factors that modulate the expression of genes involved in phosphate metabolism or transport (preferred examples include, without limitation, Pho2 and Pho4); transcription factors that modulate the expression of genes involved in nucleotide metabolism or transport (preferred examples include, without limitation, Ppr1 and UaY); transcription factors that modulate the expression of genes involved in cell wall processes (preferred examples include, without limitation, Ace2, Swi4, and Swi6); transcription factors that modulate the expression of genes involved in sporulation (preferred examples include, without limitation, Ime1 and Ime4); transcription factors that modulate the expression of genes involved in phospholipid synthesis (preferred examples include, without limitation, Ino2); transcription factors that modulate the expression of genes involved in aflatoxin biosynthesis (preferred examples include, without limitation, AflR); transcription factors that modulate the expression of genes involved in lovastatin biosynthesis (preferred examples include, without limitation, AAD34561 and LovE); and transcription factors that modulate the expression of genes involved in filamentous fungal development (preferred examples include, without limitation, AbaA). The term “general transcription factors” is as used before. The term “invasion” is as used before.

[0085] In certain embodiments of the methods according to this aspect of the invention, the gene either encodes a transmembrane transporter or the product that it encodes acts on a transmembrane transporter. The term “transmembrane transporter” is as used before Preferred classes of transmembrane transporters include, without limitation, proteins of the ATP-binding cassette superfamily, members of the Major Facilitator Superfamily (MFS) that include, without limitation Pump1 and Pump2, P-type ATPases, members of the mitochondrial carrier family (MCF) that include, without limitation, Pet9 and AAD34562, ion channels, permeases that include, without limitation, Bap2, Hip1, Mep1, and Mep2; and components that transport sugars, ions, or metals.

[0086] In certain embodiments of the methods according to this aspect of the invention, the gene either encodes a kinase or the product that it encodes acts on a kinase. The term “kinase” is as used before. Preferred kinases include, without limitation, Cdc28, Elm1, Fus3, Gcn2, Hog1, Hsl1, Hxk2, Kss1, Pbs2, Pho85, Rim15, Ste7, Sch9, Snf1, Ste11, Ste20, Tpk1, Tpk2, and Tpk3.

[0087] In certain embodiments of the methods according to this aspect of the invention, the gene either encodes a G-protein or the product that it encodes acts on a G-protein. The term “G-protein” is as used before. Preferred G-proteins include, without limitation Cdc42, FadA, Gpa1, Gpa2, Ras1, and Ras2.

[0088] In certain embodiments of the methods according to this aspect of the invention, the gene either encodes a cell surface receptor or the product that it encodes acts on a cell surface receptor. The term “cell surface receptor” is as used before. Preferred cell surface receptors include, without limitation, G-protein coupled receptors. Preferred G-protein coupled receptors include, without limitation, Gpr1.

[0089] In certain embodiments of the methods according to this aspect of the invention, the gene either encodes a GTPase activating protein or the product that it encodes acts on a GTPase activating protein. The term “GTPase activating protein” is as used before. Preferred GTPase activating proteins include, without limitation, RGS family members. “RGS family members” are regulators of G-protein signaling that act upon G-protein coupled receptors. Preferred RGS family members include, without limitation, FlbA, Rgs2, and Sst2.

[0090] In certain embodiments of the methods according to this aspect of the invention, the gene either encodes a guanine nucleotide exchange factor or the product that it encodes acts on a guanine nucleotide exchange factor. The term “guanine nucleotide exchange factor” is as used before. Preferred guanine nucleotide exchange factors include, without limitation, Cdc24 and Cdc25.

[0091] In certain embodiments of the methods according to this aspect of the invention, the gene either encodes a phosphatase or the product that it encodes acts on a phosphatase. The term “phosphatase” is as used before. Preferred phosphatases include, without limitation, Cdc55 and Ptc1.

[0092] In certain embodiments of the methods according to this aspect of the invention, the gene either encodes a protease or the product that it encodes acts on a protease. The term “protease” is as used before. Preferred proteases include, without limitation, Rim13 and LF.

[0093] In certain embodiments of the methods according to this aspect of the invention, the gene either encodes a cyclic nucleotide phosphodiesterase or the product that it encodes acts on a cyclic nucleotide phosphodiesterase. The term “cyclic nucleotide phosphodiesterase” is as used before. Preferred examples of cyclic nucleotide phosphodiesterases include, without limitation, Pde2.

[0094] In certain embodiments of the methods according to this aspect of the invention, the gene either encodes a bacterial protein toxin or the product that it encodes acts on a bacterial protein toxin. The term “bacterial protein toxin” is as used before. Preferred bacterial protein toxins include, without limitation, Anthrax toxin edema factor (EF; Bacillus anthracis), Anthrax toxin lethal factor (LF; Bacillus anthracis), adenylate cyclase toxin (Bordetella pertussis), Cholera enterotoxin (Vibrio cholerae), LT toxin (Escherichia coli), ST toxin (E. coli), Shiga toxin (Shigella dysenteriae), Perfringens enterotoxin (Clostridium perfringens), Botulinum toxin (Clostridium botulinum), Tetanus toxin (Clostridium tetani), Diphtheria toxin (Corynebacterium diphtheriae), Exotoxin A (Pseudomonas aeruginosa), Exoenzyme S (P. aeruginosa), Pertussis toxin (Bordetella pertussis), alpha and epsilon toxins (C. perfringens), lethal toxin (LT; Clostridium sordellii), toxins A and B (Clostridium dificile), and phospholipase C (Clostridium bifermentans).

[0095] In certain embodiments of the methods according to this aspect of the invention, the gene either encodes an importin protein or the product that it encodes acts on an importin protein. The 2 term “importin” protein is as used before. Preferred examples of importin proteins include, without limitation, Msn5.

[0096] In certain embodiments of the methods according to this aspect of the invention, the gene either encodes a RNA-binding protein or the product that it encodes acts on a RNA-binding protein. Preferred examples of RNA-binding proteins include, without limitation, Dhh1 and Whi3.

[0097] In certain embodiments of the methods according to this aspect of the invention, the gene either encodes a component of a SCF complex or the product that it encodes acts on a component of a SCF complex. The term “component of a SCF complex” is as used before. Preferred examples of components of a SCF complex include, without limitation, Grr1.

[0098] In certain embodiments of the methods according to this aspect of the invention, the gene either encodes or the gene product acts on a biosynthetic enzyme. In certain embodiments of the methods according to this aspect of the invention, the gene acts on biosynthetic enzyme for the secondary metabolite to be produced. The terms “biosynthetic enzyme” and “biosynthetic enzyme for the secondary metabolite to be produced” are as used before.

[0099] In certain embodiments of the methods according to this aspect of the invention, the secondary metabolite is an anti-bacterial. The term “anti-bacterial” is as used before. Preferred anti-bacterials include, without limitation, β-lactams. Preferred β-lactams include, without limitation, penicillins and cephalosporins and biosynthetic intermediates thereof. Preferred penicillins and biosynthetic intermediates include, without limitation, isopenicillin N, 6-aminopenicillanic acid (6-APA), penicillin G, penicillin N, and penicillin V. Preferred cephalosporins and biosynthetic intermediates include, without limitation, deacetoxycephalosporin V (DAOC V), deacetoxycephalosporin C (DAOC), deacetylcephalosporin C (DAC), 7-aminodeacetoxycephalosporanic acid (7-ADCA), cephalosporin C, 7-B-(5-carboxy-5-oxopentanamido)-cephalosporanic acid (keto-AD-7ACA), 7-B-(4-carboxybutanamido)-cephalosporanic acid (GL-7ACA), and 7-aminocephalosporanic acid (7ACA).

[0100] In certain embodiments of the methods according to this aspect of the invention, the secondary metabolite is an anti-hypercholesterolemic or a biosynthetic intermediate thereof. An “anti-hypercholesterolemic” is as used before. Preferred anti-hypercholesterolemics include, without limitation, lovastatin, mevastatin, simvastatin, and pravastatin.

[0101] In certain embodiments of the methods according to this aspect of the invention, the secondary metabolite is an immunosuppressant or a biosynthetic intermediate thereof. An “immunosuppressant” is as used before. Preferred immunosuppressants include, without limitation, members of the cyclosporin family and beauverolide L. Preferred cyclosporins include, without limitation, cyclosporin A and cyclosporin C.

[0102] In certain embodiments of the methods according to this aspect of the invention, the secondary metabolite is an ergot alkaloid or a biosynthetic intermediate thereof. The term “ergot alkaloid” is as used before. Preferred classes of ergot alkaloids include clavine alkaloids, lysergic acids, lysergic acid amides, and ergot peptide alkaloids. Preferred ergot alkaloids include, without limitation, ergotamine, ergosine, ergocristine, ergocryptine, ergocornine, ergotaminine, ergosinine, ergocristinine, ergocryptinine, ergocorninine, ergonovine, ergometrinine, and ergoclavine.

[0103] In certain embodiments of the methods according to this aspect of the invention, the secondary metabolite is an inhibitor of angiogenesis or a biosynthetic intermediate thereof. The term “inhibitor of angiogenesis” is as used before. Preferred inhibitors of angiogenesis include, without limitation, fumagillin and ovalicin.

[0104] In certain embodiments of the methods according to this aspect of the invention, the secondary metabolite is a glucan synthase inhibitor or a biosynthetic intermediate thereof. The term “glucan synthase inhibitor” is as used before. Preferred glucan synthase inhibitors include, without limitation, echinocandin B, pneumocandin B, aculeacin A, and papulacandin.

[0105] In certain embodiments of the methods according to this aspect of the invention, the secondary metabolite is a member of the gliotoxin family of compounds or a biosynthetic intermediate thereof. The term “gliotoxin family of compounds” is as used before. Preferred members of the “gliotoxin family of compounds” include, without limitation, gliotoxin and aspirochlorine.

[0106] In certain embodiments of the methods according to this aspect of the invention, the secondary metabolite is a fungal toxin or a biosynthetic intermediate thereof. The term “fungal toxin” is as used before. Preferred fungal toxins include, without limitation, aflatoxins, patulin, zearalenone, cytochalasin, griseofulvin, ergochrome, cercosporin, marticin, xanthocillin, coumarins, tricothecenes, fusidanes, sesterpenes, amatoxins, malformin A, phallotoxins, pentoxin, HC toxin, psilocybin, bufotenine, lysergic acid, sporodesmin, pulcheriminic acid, sordarins, fumonisins, ochratoxin A, and fusaric acid.

[0107] In certain embodiments of the methods according to this aspect of the invention, the secondary metabolite is a modulator of cell surface receptor signaling or a biosynthetic intermediate thereof. The term “cell surface receptor” is as used before. Preferred modulators of cell surface signaling include, without limitation, the insulin receptor agonist L-783,281 and the cholecystokinin receptor antagonist asperlicin.

[0108] In certain embodiments of the methods according to this aspect of the invention, the secondary metabolite is a plant growth regulator or a biosynthetic intermediate thereof. The term “plant growth regulator” is as used before. Preferred plant growth regulators include, without limitation, cytokinin, auxin, gibberellin, abscisic acid, and ethylene.

[0109] In certain embodiments of the methods according to this aspect of the invention, the secondary metabolite is a pigment or a biosynthetic intermediate thereof. The term “pigment” is as defined before. Preferred pigments include, without limitation, melanins and carotenoids.

[0110] In certain embodiments of the methods according to this aspect of the invention, the secondary metabolite is an insecticide or a biosynthetic intermediate thereof. The term “insecticide” is as used before. Preferred insecticides include, without limitation, nodulisporic acid.

[0111] In certain embodiments of the methods according to this aspect of the invention, the secondary metabolite is an anti-neoplastic compound or a biosynthetic intermediate thereof. The term “anti-neoplastic” compound is as used before. Preferred anti-neoplastic compounds include, without limitation, taxol (paclitaxel) and related taxoids.

[0112] In certain embodiments of the methods according to this aspect of the invention, the gene is selected from the group consisting of AAD34561, AAD34562, abaA, ACE2, ADR1, AFL1, aflR, AFT1, amyR, areA, ASH1, BAP2, BCY1, CAT8, CDC24, CDC25, CDC28, CDC42, CDC55, CLB2, creA, CTS1, CUP9, CYR1, DFG16, DHH1, DPH3, ELM1, facB, FLO1, FLO11, FLO8, FUS3, GCN2, GCN4, GCR1, GCR2, GLN3, GPA1, GPA2, GPR1, GRR1, GTS1, HAP1, HAP4, HIP1, HMS1, HMS2, HOG1, HSL1, HXK2, IME1, IME4, INO2, INV11, INV13, INV16, INV5, INV7, INV9, KSS1, LEU3, lovE, LYS14, MAC1, MCM1, MEP1, MEP2, MET28, MET31, MET4, metR, MGA1, MIG1, MIG2, MSN1, MSN2, MSN4, MSN5, MSS11, MTH1, NPR1, nreB, NRG1, OAF1, pacC, PBS2, PDE2, PET9, PHD1, PHO2, PHO4, PHO85, pkaR, PPR1, PTC1, PUT3, RAS1, RAS2, RGS2, RIM101, RIM13, RIM15, RIM9, ROX1, RRE1, SCH9, SFL1, SHO1, SHR3, SIN3, SIP4, SKN7, SNF1, SNF2, SNF7, SNF8, sconB, SOK2, SRB10, SRB11, SRB8, SRB9, sreA, sreP, SRV2, SSD1, SSN6, SST2, STE11, STE12, STE20, STE50, STE7, STP22, SWI4, SWI6, tamA, TEC1, TPK1, TPK2, TPK3, TUP1, UaY, UGA3, URE2, VPS28, VPS36, WHI3, YMR077c, YNL255c, YPR1, ZAP1, genes encoding bacterial protein toxins, and any fungal homologs of the aforementioned genes. The term “fungal homolog” is as used before.

[0113] In certain embodiments of the methods according to this aspect of the invention, the methods further comprise purifying the secondary metabolite from a culture of the fungus. The term “purifying” is as used before.

[0114] In a third aspect, the invention provides methods for improving production of a secondary metabolite in a fungus by increasing efflux or excretion of the secondary metabolite, the method comprising modulating the expression of a gene involved in regulation of secondary metabolite production in a manner that increases efflux or excretion of the secondary metabolite. “Increasing efflux or excretion of the secondary metabolite” means that a greater quantity of the secondary metabolite passes from the inside of the fungal cells to the outside of the fungal cell per unit time in the absence of lysis of the fungal cells. “Outside of the fungal cell” is defined as being no longer contained wholly within the lipid bilayer of the cell and/or extractable from the cell with methods that do not release a majority of intracellular contents. Increasing efflux of a metabolite could have beneficial impacts on the economics of a fermentation that include, but are not limited to, increasing the amount of metabolite available for isolation in the absence of cell lysis (thus reducing downstream processing costs) and elimination of negative autoregulation by the metabolite to allow increased synthesis.

[0115] In certain embodiments of the methods according to this aspect of the invention, the modulation is overexpression of the gene. “Overexpression of the gene” is as used before. Preferred genes according to this aspect of the invention include, without limitation, AAD34558, AAD34561, AAD34564, ATR1, ERG6, FCR1, GCN4, lovE, MDR1, PDR1, PDR3, PDR5, PDR10, PDR13, SNQ2, TRI12, and YAP1.

[0116] In certain embodiments of the methods according to this aspect of the invention, the modulation is expression of a dominant mutation of the gene. The term “dominant mutation” is as used before. Preferred dominant mutations according to this aspect of the invention are as used before.

[0117] In certain embodiments of the methods according to this aspect of the invention, the modulation is mediated by a peptide modulator of gene expression. The term “peptide” is as used before. Peptides may be expressed in the cell or supplied exogenously. Preferably, they are provided on a scaffold to increase intracellular stability and to provide conformational constraint. Preferred peptides according to this aspect of the invention include those discussed earlier.

[0118] In certain embodiments of the methods according to this aspect of the invention, the peptide modulator is an activator of gene expression. The term “activator of gene expression” is as used before.

[0119] In certain embodiments of the methods according to this aspect of the invention, the peptide modulator is an inhibitor of gene expression. The term “inhibitor of gene expression” is as used before.

[0120] In certain embodiments of the methods according to this aspect of the invention, the modulation is mediated by a small molecule modulator of gene expression. In certain embodiments of the methods according to this aspect of the invention, the small molecule modulator is an activator of gene expression. The term “activator of gene expression” is as used before. In certain embodiments of the methods according to this aspect of the invention, the small molecule modulator is an inhibitor of gene expression. The term “inhibitor of gene expression” is as used before.

[0121] In certain embodiments of the methods according to this aspect of the invention, the modulation is conditional expression of the gene. The term “conditional expression” of a gene is as used before.

[0122] In certain embodiments of the methods according to this aspect of the invention, the gene either encodes a transcription factor or the product that it encodes acts on a transcription factor. The term “transcription factor” is as used before. Preferred transcription factors include, without limitation, AAD34561, Fcr1, Gcn4, LovE, Pdr1, Pdr3, and Yap1.

[0123] In certain embodiments of the methods according to this aspect of the invention, the gene either encodes a transmembrane transporter or the product that it encodes acts on a transmembrane transporter. The term “transmembrane transporter” is as used before. Preferred transmembrane transporters include, without limitation, AAD34558, AAD34564, Atr1, Mdr1, Pdr5, Pdr10, Snq2, and Tri12.

[0124] In certain embodiments of the methods according to this aspect of the invention, the gene either encodes a kinase or the product that it encodes acts on a kinase. A “kinase” is as used before.

[0125] In certain embodiments of the methods according to this aspect of the invention, the gene either encodes a G-protein or the product that it encodes acts on a G-protein. A “G-protein” is as used before.

[0126] In certain embodiments of the methods according to this aspect of the invention, the gene either encodes a cell surface receptor or the product that it encodes acts on a cell surface receptor. A “cell surface receptor” is as used before.

[0127] In certain embodiments of the methods according to this aspect of the invention, the gene either encodes a GTPase activating protein or the product that it encodes acts on a GTPase activating protein. A “GTPase activating protein” is as used before.

[0128] In certain embodiments of the methods according to this aspect of the invention, the gene either encodes a guanine nucleotide exchange factor or the product that it encodes acts on a guanine nucleotide exchange factor. A “guanine nucleotide exchange factor” is as used before.

[0129] In certain embodiments of the methods according to this aspect of the invention, the gene either encodes a phosphatase or the product that it encodes acts on a phosphatase. A “phosphatase” is as used before.

[0130] In certain embodiments of the methods according to this aspect of the invention, the gene either encodes a protease or the product that it encodes acts on a protease. A “protease” is as used before.

[0131] In certain embodiments of the methods according to this aspect of the invention, the gene either encodes a cyclic nucleotide phosphodiesterase or the product that it encodes acts on a cyclic nucleotide phosphodiesterase. A “cyclic nucleotide phosphodiesterase” is as used before.

[0132] In certain embodiments of the methods according to this aspect of the invention, the gene either encodes a bacterial protein toxin or the product that it encodes acts on a bacterial protein toxin. A “bacterial protein toxin” is as used before.

[0133] In certain embodiments of the methods according to this aspect of the invention, the gene either encodes an importin protein or the product that it encodes acts on an importin protein. A “importin” protein is as used before.

[0134] In certain embodiments of the methods according to this aspect of the invention, the gene either encodes aRNA-binding protein or the product that it encodes acts on a RNA-binding protein.

[0135] In certain embodiments of the methods according to this aspect of the invention, the gene either encodes a component of a SCF complex or the product that it encodes acts on a component of a SCF complex. A “component of a SCF complex” is as used before.

[0136] In certain embodiments of the methods according to this aspect of the invention, the gene either encodes or the gene product acts on a biosynthetic enzyme. In certain embodiments of the methods according to this aspect of the invention, the gene acts on biosynthetic enzyme for the secondary metabolite to be produced. The terms “biosynthetic enzyme” and “biosynthetic enzyme for the secondary metabolite to be produced” are as used before.

[0137] In certain embodiments of the methods according to this aspect of the invention, the secondary metabolite is an anti-bacterial. The term “anti-bacterial” is as used before. Preferred anti-bacterials include, without limitation, β-lactams. Preferred β-lactams include, without limitation, penicillins and cephalosporins. Preferred penicillins and biosynthetic intermediates include, without limitation, isopenicillin N, 6-aminopenicillanic acid (6-APA), penicillin G, penicillin N, and penicillin V. Preferred cephalosporins and biosynthetic intermediates include, without limitation, deacetoxycephalosporin V (DAOC V), deacetoxycephalosporin C (DAOC), deacetylcephalosporin C (DAC), 7-aminodeacetoxycephalosporanic acid (7-ADCA), cephalosporin C, 7-B-(5-carboxy-5-oxopentanamido)-cephalosporanic acid (keto-AD-7ACA), 7-B-(4-carboxybutanamido)-cephalosporanic acid (GL-7ACA), and 7-aminocephalosporanic acid (7ACA).

[0138] In certain embodiments of the methods according to this aspect of the invention, the secondary metabolite is an anti-hypercholesterolemic or a biosynthetic intermediate thereof. An “anti-hypercholesterolemic” is as used before. Preferred anti-hypercholesterolemics include, without limitation, lovastatin, mevastatin, simvastatin, and pravastatin.

[0139] In certain embodiments of the methods according to this aspect of the invention, the secondary metabolite is an immunosuppressant or a biosynthetic intermediate thereof. An “immunosuppressant” is as used before. Preferred immunosuppressants include, without limitation, members of the cyclosporin family and beauverolide L. Preferred cyclosporins include, without limitation, cyclosporin A and cyclosporin C.

[0140] In certain embodiments of the methods according to this aspect of the invention, the secondary metabolite is an ergot alkaloid or a biosynthetic intermediate thereof. The term “ergot alkaloid” is as used before. Preferred classes of ergot alkaloids include clavine alkaloids, lysergic acids, lysergic acid amides, and ergot peptide alkaloids. Preferred ergot alkaloids include, without limitation, ergotamine, ergosine, ergocristine, ergocryptine, ergocornine, ergotaminine, ergosinine, ergocristinine, ergocryptinine, ergocorninine, ergonovine, ergometrinine, and ergoclavine.

[0141] In certain embodiments of the methods according to this aspect of the invention, the secondary metabolite is an inhibitor of angiogenesis or a biosynthetic intermediate thereof. The term “inhibitor of angiogenesis” is as used before. Preferred inhibitors of angiogenesis include, without limitation, fumagillin and ovalicin.

[0142] In certain embodiments of the methods according to this aspect of the invention, the secondary metabolite is a glucan synthase inhibitor or a biosynthetic intermediate thereof. The term “glucan synthase inhibitor” is as used before. Preferred glucan synthase inhibitors include, without limitation, echinocandin B, pneumocandin B, aculeacin A, and papulacandin.

[0143] In certain embodiments of the methods according to this aspect of the invention, the secondary metabolite is a member of the gliotoxin family of compounds or a biosynthetic intermediate thereof. The term “gliotoxin family of compounds” is as used before. Preferred members of the “gliotoxin family of compounds” include, without limitation, gliotoxin and aspirochlorine.

[0144] In certain embodiments of the methods according to this aspect of the invention, the secondary metabolite is a fungal toxin or a biosynthetic intermediate thereof. The term “fungal toxin” is as used before. Preferred fungal toxins include, without limitation, aflatoxins, patulin, zearalenone, cytochalasin, griseofulvin, ergochrome, cercosporin, marticin, xanthocillin, coumarins, tricothecenes, fusidanes, sesterpenes, amatoxins, malformin A, phallotoxins, pentoxin, HC toxin, psilocybin, bufotenine, lysergic acid, sporodesmin, pulcheriminic acid, sordarins, fumonisins, ochratoxin A, and fusaric acid.

[0145] In certain embodiments of the methods according to this aspect of the invention, the secondary metabolite is a modulator of cell surface receptor signaling or a biosynthetic intermediate thereof. The term “cell surface receptor” is as used before. Preferred modulators of cell surface signaling include, without limitation, the insulin receptor agonist L-783,281 and the cholecystokinin receptor antagonist asperlicin.

[0146] In certain embodiments of the methods according to this aspect of the invention, the secondary metabolite is a plant growth regulator or a biosynthetic intermediate thereof. The term “plant growth regulator” is as used before. Preferred plant growth regulators include, without limitation, cytokinin, auxin, gibberellin, abscisic acid, and ethylene.

[0147] In certain embodiments of the methods according to this aspect of the invention, the secondary metabolite is a pigment or a biosynthetic intermediate thereof. The term “pigment” is as defined before. Preferred pigments include, without limitation, melanins and carotenoids.

[0148] In certain embodiments of the methods according to this aspect of the invention, the secondary metabolite is an insecticide or a biosynthetic intermediate thereof. The term “insecticide” is as used before. Preferred insecticides include, without limitation, nodulisporic acid.

[0149] In certain embodiments of the methods according to this aspect of the invention, the secondary metabolite is an anti-neoplastic compound or a biosynthetic intermediate thereof. The term “anti-neoplastic” compound is as used before. Preferred anti-neoplastic compounds include, without limitation, taxol (paclitaxel) and related taxoids.

[0150] In certain embodiments of the methods according to this aspect of the invention, the gene is selected from the group consisting of AAD34558, AAD34561, AAD34564, ATR1, ERG6, FCR1, GCN4, lovE, MDR1, PDR1, PDR3, PDR5, PDR10, PDR13, SNQ2, TRI12, YAP1, and any fungal homologs of the aforementioned genes. The term “fungal homolog” is as used before.

[0151] In certain embodiments of the methods according to this aspect of the invention, the methods further comprise purifying the secondary metabolite from a culture of the fungus. The term “purifying” is as used before.

[0152] In a fourth aspect, the invention provides methods for improving production of a secondary metabolite in a fungus by decreasing production of side products or non-desired secondary metabolites, the method comprising modulating the expression of a gene involved in regulation of secondary metabolite production in a manner that decreases production of side products or non-desired secondary metabolites.

[0153] In certain embodiments of the methods according to this aspect of the invention, the modulation is overexpression of the gene. “Overexpression of the gene” is as used before. Preferred genes according to this aspect of the invention include, without limitation, AAD34561, AAD34562, abaA, ACE2, ADR1, AFL1, aflR, AFT1, amyR, areA, ASH1, BAP2, BCY1, CAT8, CDC24, CDC25, CDC28, CDC42, CDC55, CLB2, creA, CTS1, CUP9, CYR1, DFG16, DHH1, DPH3, ELM1, facB, FLO1, FLO11, FLO8, FUS3, GCN2, GCN4, GCR1, GCR2, GLN3, GPA1, GPA2, GPR1, GRR1, GTS1, HAP1, HAP4, HIP1, HMS1, HMS2, HOG1, HSL1, HXK2, IME1, IME4, INO2, INV11, INV13, INV16, INV5, INV7, INV9, KSS1, LEU3, lovE, LYS14, MAC1, MCM1, MEP1, MEP2, MET28, MET31, MET4, metR, MGA1, MIG1, MIG2, MSN1, MSN2, MSN4, MSN5, MSS11, MTH1, NPR1, nreB, NRG1, OAF1, pacC, PBS2, PDE2, PET9, PHD1, PHO2, PHO4, PHO85, pkaR, PPR1, PTC1, PUT3, RAS1, RAS2, RGS2, RIM101, RIM13, RIM15, RIM9, ROX1, RRE1, SCH9, sconB, SFL1, SHO1, SHR3, SIN3, SIP4, SKN7, SNF1, SNF2, SNF7, SNF8, SOK2, SRB10, SRB11, SRB8, SRB9, sreA, sreP, SRV2, SSD1, SSN6, SST2, STE11, STE12, STE20, STE50, STE7, STP22, SWI4, SWI6, tamA, TEC1, TPK2, TPK2, TPK3, TUP1, UaY, UGA3, URE2, VPS28, VPS36, WHI3, YMR077c, YNL255c, YPR1, ZAP1, genes encoding bacterial protein toxins, and any fungal homologs of the aforementioned genes.

[0154] In certain embodiments of the methods according to this aspect of the invention, the modulation is expression of a dominant mutation of the gene. The term “dominant mutation” is as used before. Preferred dominant mutations according to this aspect of the invention are as used before.

[0155] In certain embodiments of the methods according to this aspect of the invention, the modulation is mediated by a peptide modulator of gene expression. The term “peptide” is as used before. Peptides may be expressed in the cell or supplied exogenously. Preferably, they are provided on a scaffold to increase intracellular stability and to provide conformational constraint. Preferred peptides according to this aspect of the invention include those discussed earlier.

[0156] In certain embodiments of the methods according to this aspect of the invention, the peptide modulator is an activator of gene expression. The term “activator of gene expression” is as used before.

[0157] In certain embodiments of the methods according to this aspect of the invention, the peptide modulator is an inhibitor of gene expression. The term “inhibitor of gene expression” is as used before.

[0158] In certain embodiments of the methods according to this aspect of the invention, the modulation is mediated by a small molecule modulator of gene expression. In certain embodiments of the methods according to this aspect of the invention, the small molecule modulator is an activator of gene expression. The term “activator of gene expression” is as used before. In certain embodiments of the methods according to this aspect of the invention, the small molecule modulator is an inhibitor of gene expression. The term “inhibitor of gene expression” is as used before.

[0159] In certain embodiments of the methods according to this aspect of the invention, the modulation is conditional expression of the gene. The term “conditional expression” of a gene is as used before.

[0160] In certain embodiments of the methods according to this aspect of the invention, the gene either encodes a transcription factor or the product that it encodes acts on a transcription factor. The term “the gene acts on” is as used before. The term “transcription factor” is as used before. Preferred transcription factors include, without limitation, transcription factors that modulate the expression of genes involved in the production or response to the small molecule cAMP (preferred examples include, without limitation, Mga1, Msn2, Msn4, Sfl1, and Sok2); transcription factors that function downstream of mitogen-activated protein (MAP) kinase signaling pathways that regulate the yeast invasion response (preferred examples include, without limitation, Mcm1, Ste12, and Tec1); transcription factors that modulate the expression of genes involved in nitrogen regulation (preferred examples include, without limitation, AreA, Gln3, Hms1, Hms2, NreB, TamA, and Uga3); transcription factors that modulate the expression of genes involved in pH regulation in fungi (preferred examples include, without limitation PacC and Rim101); general transcription factors (preferred examples include, without limitation, Sin3, Snf2, Srb8, Srb9, Srb10, Srb 11, Ssn6, and Tup1); transcription factors that modulate the expression of genes involved in carbon metabolism (preferred examples include, without limitation, Adr1, Cat8, CreA, FacB, Gcr1, Gcr2, Hap4, Mig1, Mig2, Mth1, Nrg1, Oaf1, and Sip4); heme-dependent transcription factors (preferred examples include, without limitation, Hap1 and Rox1); transcription factors that modulate the expression of genes involved in the uptake of metals (preferred examples include, without limitation, Aft1, Cup9, Mac1, SreP, SreA, and Zap1); transcription factors that modulate the expression of genes involved in cell-cycle regulation (preferred examples include, without limitation, Skn7, Swi4, and Swi6); transcription factors that modulate the expression of genes involved in invasion (preferred examples include, without limitation, Ash1, Flo8, Gts1, Inv7, Msn1, Mss11, Phd1, and Rre1); transcription factors that modulate the expression of genes involved in amino acid biosynthesis or transport (preferred examples include, without limitation, Gcn4, Leu3, Lys14, Met4, Met28, Met31, MetR, Put3, SconB, and Uga3); transcription factors that modulate the expression of genes involved in phosphate metabolism or transport (preferred examples include, without limitation, Pho2 and Pho4); transcription factors that modulate the expression of genes involved in nucleotide metabolism or transport (preferred examples include, without limitation, Ppr1 and UaY); transcription factors that modulate the expression of genes involved in cell wall processes (preferred examples include, without limitation, Ace2, Swi4, and Swi6); transcription factors that modulate the expression of genes involved in sporulation (preferred examples include, without limitation, Ime1 and Ime4); transcription factors that modulate the expression of genes involved in phospholipid synthesis (preferred examples include, without limitation, Ino2); transcription factors that modulate the expression of genes involved in aflatoxin biosynthesis (preferred examples include, without limitation, AflR); transcription factors that modulate the expression of genes involved in lovastatin biosynthesis (preferred examples include, without limitation, AAD34561 and LovE); and transcription factors that modulate the expression of genes involved in filamentous fungal development (preferred examples include, without limitation, AbaA). The term “general transcription factors” is as used before. The term “invasion” is as used before.

[0161] In certain embodiments of the methods according to this aspect of the invention, the gene either encodes a transmembrane transporter or the product that it encodes acts on a transmembrane transporter. The term “transmembrane transporter” is as used before. Preferred classes of transmembrane transporters include, without limitation, proteins of the ATP-binding cassette superfamily, members of the Major Facilitator Superfamily (MFS) that include, without limitation Pump 1 and Pump2, P-type ATPases, members of the mitochondrial carrier family (MCF) that include, without limitation, Pet9 and AAD34562, ion channels, permeases that include, without limitation, Bap2, Hip1, Mep1, and Mep2; and components that transport sugars, ions, or metals.

[0162] In certain embodiments of the methods according to this aspect of the invention, the gene either encodes a kinase or the product that it encodes acts on a kinase. The term “kinase” is as used before. Preferred kinases include, without limitation, Cdc28, Elm1, Fus3, Gcn2, Hog1, Hsl1, Hxk2, Kss1, Pbs2, Pho85, Rim15, Ste7, Sch9, Snf1, Ste11, Ste20, Tpk1, Tpk2, and Tpk3.

[0163] In certain embodiments of the methods according to this aspect of the invention, the gene either encodes a G-protein or the product that it encodes acts on a G-protein. The term “G-protein” is as used before. Preferred G-proteins include, without limitation Cdc42, FadA, Gpa1, Gpa2, Ras1, and Ras2.

[0164] In certain embodiments of the methods according to this aspect of the invention, the gene either encodes a cell surface receptor or the product that it encodes acts on a cell surface receptor. The term “cell surface receptor” is as used before. Preferred cell surface receptors include, without limitation, G-protein coupled receptors. Preferred G-protein coupled receptors include, without limitation, Gpr1.

[0165] In certain embodiments of the methods according to this aspect of the invention, the gene either encodes a GTPase activating protein or the product that it encodes acts on a GTPase activating protein. The term “GTPase activating protein” is as used before. Preferred GTPase activating proteins include, without limitation, RGS family members. “RGS family members” are regulators of G-protein signaling that act upon G-protein coupled receptors. Preferred RGS family members include, without limitation, FlbA, Rgs2, and Sst2.

[0166] In certain embodiments of the methods according to this aspect of the invention, the gene either encodes a guanine nucleotide exchange factor or the product that it encodes acts on a guanine nucleotide exchange factor. The term “guanine nucleotide exchange factor” is as used before. Preferred guanine nucleotide exchange factors include, without limitation, Cdc24 and Cdc25.

[0167] In certain embodiments of the methods according to this aspect of the invention, the gene either encodes a phosphatase or the product that it encodes acts on a phosphatase. The term “phosphatase” is as used before. Preferred phosphatases include, without limitation, Cdc55 and Ptc1.

[0168] In certain embodiments of the methods according to this aspect of the invention, the gene either encodes a protease or the product that it encodes acts on a protease. The term “protease” is as used before. Preferred proteases include, without limitation, Rim13 and LF.

[0169] In certain embodiments of the methods according to this aspect of the invention, the gene either encodes a cyclic nucleotide phosphodiesterase or the product that it encodes acts on a cyclic nucleotide phosphodiesterase. The term “cyclic nucleotide phosphodiesterase” is as used before. Preferred examples of cyclic nucleotide phosphodiesterases include, without limitation, Pde2.

[0170] In certain embodiments of the methods according to this aspect of the invention, the gene either encodes a bacterial protein toxin or the product that it encodes acts on a bacterial protein toxin. The term “bacterial protein toxin” is as used before. Preferred bacterial protein toxins include, without limitation, Anthrax toxin edema factor (EF; Bacillus anthracis), Anthrax toxin lethal factor (LF; Bacillus anthracis), adenylate cyclase toxin (Bordetella pertussis), Cholera enterotoxin (Vibrio cholerae), LT toxin (Escherichia coli), ST toxin (E. coli), Shiga toxin (Shigella dysenteriae), Perfringens enterotoxin (Clostridium perfringens), Botulinum toxin (Clostridium botulinum), Tetanus toxin (Clostridium tetani), Diphtheria toxin (Corynebacterium diphtheriae), Exotoxin A (Pseudomonas aeruginosa), Exoenzyme S (P. aeruginosa), Pertussis toxin (Bordetella pertussis), alpha and epsilon toxins (C. perfringens), lethal toxin (LT; Clostridium sordellii), toxins A and B (Clostridium dificile), and phospholipase C (Clostridium bifermentans).

[0171] In certain embodiments of the methods according to this aspect of the invention, the gene either encodes an importin protein or the product that it encodes acts on an importin protein. The term “importin” protein is as used before. Preferred examples of importin proteins include, without limitation, Msn5.

[0172] In certain embodiments of the methods according to this aspect of the invention, the gene either encodes a RNA-binding protein or the product that it encodes acts on a RNA-binding protein. Preferred examples of RNA-binding proteins include, without limitation, Dhh1 and Whi3.

[0173] In certain embodiments of the methods according to this aspect of the invention, the gene either encodes a component of a SCF complex or the product that it encodes acts on a component of a SCF complex. The term “component of a SCF complex” is as used before. Preferred examples of components of a SCF complex include, without limitation, Grr1.

[0174] In certain embodiments of the methods according to this aspect of the invention, the gene either encodes or the gene product acts on a biosynthetic enzyme. In certain embodiments of the methods according to this aspect of the invention, the gene acts on biosynthetic enzyme for the secondary metabolite to be produced. The terms “biosynthetic enzyme” and “biosynthetic enzyme for the secondary metabolite to be produced” are as used before.

[0175] In certain embodiments of the methods according to this aspect of the invention, the secondary metabolite is an anti-bacterial. The term “anti-bacterial” is as used before. Preferred anti-bacterials include, without limitation, β-lactams. Preferred β-lactams include, without limitation, penicillins and cephalosporins. Preferred penicillins and biosynthetic intermediates include, without limitation, isopenicillin N, 6-aminopenicillanic acid (6-APA), penicillin G, penicillin N, and penicillin V. Preferred cephalosporins and biosynthetic intermediates include, without limitation, deacetoxycephalosporin V (DAOC V), deacetoxycephalosporin C (DAOC), deacetylcephalosporin C (DAC), 7-aminodeacetoxycephalosporanic acid (7-ADCA), cephalosporin C, 7-B-(5-carboxy-5-oxopentanamido)-cephalosporanic acid (keto-AD-7ACA), 7-B-(4-carboxybutanamido)-cephalosporanic acid (GL-7ACA), and 7-aminocephalosporanic acid (7ACA).

[0176] In certain embodiments of the methods according to this aspect of the invention, the secondary metabolite is an anti-hypercholesterolemic or a biosynthetic intermediate thereof. An “anti-hypercholesterolemic” is as used before. Preferred anti-hypercholesterolemics include, without limitation, lovastatin, mevastatin, simvastatin, and pravastatin.

[0177] In certain embodiments of the methods according to this aspect of the invention, the secondary metabolite is an immunosuppressant or a biosynthetic intermediate thereof. An “immunosuppressant” is as used before. Preferred immunosuppressants include, without limitation, members of the cyclosporin family and beauverolide L. Preferred cyclosporins include, without limitation, cyclosporin A and cyclosporin C.

[0178] In certain embodiments of the methods according to this aspect of the invention, the secondary metabolite is an ergot alkaloid or a biosynthetic intermediate thereof. The term “ergot alkaloid” is as used before. Preferred classes of ergot alkaloids include clavine alkaloids, lysergic acids, lysergic acid amides, and ergot peptide alkaloids. Preferred ergot alkaloids include, without limitation, ergotamine, ergosine, ergocristine, ergocryptine, ergocornine, ergotaminine, ergosinine, ergocristinine, ergocryptinine, ergocorninine, ergonovine, ergometrinine, and ergoclavine.

[0179] In certain embodiments of the methods according to this aspect of the invention, the secondary metabolite is an inhibitor of angiogenesis or a biosynthetic intermediate thereof. The term “inhibitor of angiogenesis” is as used before. Preferred inhibitors of angiogenesis include, without limitation, fumagillin and ovalicin.

[0180] In certain embodiments of the methods according to this aspect of the invention, the secondary metabolite is a glucan synthase inhibitor or a biosynthetic intermediate thereof. The term “glucan synthase inhibitor” is as used before. Preferred glucan synthase inhibitors include, without limitation, echinocandin B, pneumocandin B, aculeacin A, and papulacandin.

[0181] In certain embodiments of the methods according to this aspect of the invention, the secondary metabolite is a member of the gliotoxin family of compounds or a biosynthetic intermediate thereof. The term “gliotoxin family of compounds” is as used before. Preferred members of the “gliotoxin family of compounds” include, without limitation, gliotoxin and aspirochlorine.

[0182] In certain embodiments of the methods according to this aspect of the invention, the secondary metabolite is a fungal toxin or a biosynthetic intermediate thereof. The term “fungal toxin” is as used before. Preferred fungal toxins include, without limitation, aflatoxins, patulin, zearalenone, cytochalasin, griseofulvin, ergochrome, cercosporin, marticin, xanthocillin, coumarins, tricothecenes, fusidanes, sesterpenes, amatoxins, malformin A, phallotoxins, pentoxin, HC toxin, psilocybin, bufotenine, lysergic acid, sporodesmin, pulcheriminic acid, sordarins, fumonisins, ochratoxin A, and fusaric acid.

[0183] In certain embodiments of the methods according to this aspect of the invention, the secondary metabolite is a modulator of cell surface receptor signaling or a biosynthetic intermediate thereof. The term “cell surface receptor” is as used before. Preferred modulators of cell surface signaling include, without limitation, the insulin receptor agonist L-783,281 and the cholecystokinin receptor antagonist asperlicin.

[0184] In certain embodiments of the methods according to this aspect of the invention, the secondary metabolite is a plant growth regulator or a biosynthetic intermediate thereof. The term “plant growth regulator” is as used before. Preferred plant growth regulators include, without limitation, cytokinin, auxin, gibberellin, abscisic acid, and ethylene.

[0185] In certain embodiments of the methods according to this aspect of the invention, the secondary metabolite is a pigment or a biosynthetic intermediate thereof. The term “pigment” is as defined before. Preferred pigments include, without limitation, melanins and carotenoids.

[0186] In certain embodiments of the methods according to this aspect of the invention, the secondary metabolite is an insecticide or a biosynthetic intermediate thereof. The term “insecticide” is as used before. Preferred insecticides include, without limitation, nodulisporic acid.

[0187] In certain embodiments of the methods according to this aspect of the invention, the secondary metabolite is an anti-neoplastic compound or a biosynthetic intermediate thereof. The term “anti-neoplastic” compound is as used before. Preferred anti-neoplastic compounds include, without limitation, taxol (paclitaxel) and related taxoids.

[0188] In certain embodiments of the methods according to this aspect of the invention, the gene is selected from the group consisting of AAD34561, AAD34562, abaA, ACE2, ADR1, AFL1, aflR, AFT1, amyR, areA, ASH1, BAP2, BCY1, CAT8, CDC24, CDC25, CDC28, CDC42, CDC55, CLB2, creA, CTS1, CUP9, CYR1, DFG16, DHH1, DPH3, ELM1, facB, FLO1, FLO11, FLO8, FUS3, GCN2, GCN4, GCR1, GCR2, GLN3, GPA1, GPA2, GPR1, GRR1, GTS1, HAP1, HAP4, HIP1, HMS1, HMS2, HOG1, HSL1, HXK2, IME1, IME4, INO2, INV11, INV13, INV16, INV5, INV7, INV9, KSS1, LEU3, lovE, LYS14, MAC1, MCM1, MEP1, MEP2, MET28, MET31, MET4, metR, MGA1, MIG1, MIG2, MSN1, MSN2, MSN4, MSN5, MSS11, MTH1, NPR1, nreB, NRG1, OAF1, pacC, PBS2, PDE2, PET9, PHD1, PHO2, PHO4, PHO85, pkaR, PPR1, PTC1, PUT3, RAS1, RAS2, RGS2, RIM101, RIM13, RIM15, RIM9, ROX1, RRE1, SCH9, sconB, SFL1, SHO1, SHR3, SIN3, SIP4, SKN7, SNF1, SNF2, SNF7, SNF8, SOK2, SRB10, SRB11, SRB8, SRB9, sreA, sreP, SRV2, SSD1, SSN6, SST2, STE11, STE12, STE20, STE50, STE7, STP22, SWI4, SWI6, tamA, TEC1, TPK1, TPK2, TPK3, TUP1, UaY, UGA3, URE2, VPS28, VPS36, WHI3, YMR077c, YNL255c, YPR1, ZAP1, genes encoding bacterial protein toxins, and any fungal homologs of the aforementioned genes. The term “fungal homolog” is as used before.

[0189] In certain embodiments of the methods according to this aspect of the invention, the methods further comprise purifying the secondary metabolite from a culture of the fungus. The term “purifying” is as used before.

[0190] In a fifth aspect, the invention provides methods for improving production of a secondary metabolite in a fungus by altering the characteristics of the fungus in a manner that is beneficial to the production of the secondary metabolite, the method comprising modulating the expression of a gene involved in regulation of secondary metabolite production in a manner that alters the characteristics of the fungus. “Altering the characteristics” means changing the morphology or growth traits of the fungus. Preferred alterations include, without limitation, those alterations that result in transition of the fungus from the hyphal to yeast form, those alterations that result in transition of the fungus from the yeast to hyphal form, alterations that lead to more or less hyphal branching, alterations that increase or decrease flocculence, adherence, cell buoyancy, surface area of the fungus, cell wall integrity and/or stability, pellet size, ability to grow at higher or lower temperatures, and alterations that increase the saturating growth density of a culture or rate of pellet formation.

[0191] In certain embodiments of the methods according to this aspect of the invention, the modulation is overexpression of the gene. “Overexpression of the gene” is as used before. Preferred genes according to this aspect of the invention include, without limitation, AAD34561, abaA, ACE2, ADR1, AFL1, aflR, AFT1, AGA1, AGA2, amyR, areA, ASH1, BAP2, BCY1, BEM1, BEM2, BEM3, BNI1, BUD2, BUD5, CAT8, CDC24, CDC25, CDC28, CDC42, CDC55, CLB2, creA, CTS1, CUP9, CYR1, DFG16, DHH1, DPH3, ELM1, facB, FLO1, FLO10, FLO11, FLO5, FLO8, FLO9, FUS3, GCN2, GCN4, GCR1, GCR2, GIC1, GIC2, GLN3, GPA1, GPA2, GPR1, GRR1, GTS1, HAP1, HAP4, HIP1, HMS1, HMS2, HOG1, HSL1, HXK2, IME1, IME4, INO2, INV11, INV13, INV16, INV5, INV7, INV9, KSS1, LEU3, lovE, LYS14, MAC1, MCM1, MEP1, MEP2, MET28, MET31, MET4, metR, MGA1, MIG1, MIG2, MSN1, MSN2, MSN4, MSN5, MSS11, MTH1, NPR1, nreB, NRG1, OAF1, pacC, PBS2, PDE2, PET9, PHD1, PHO2, PHO4, PHO85, pkaR, PPR1, PTC1, PUT3, RAS1, RAS2, RGA1, RGS2, RHO1, RHO2, RHO3, RHO4, RIM101, RIM13, RIM15, RIM9, ROX1, RRE1, RSR1, SCH9, sconB, SFL1, SHO1, SHR3, SIN3, SIP4, SKN7, SNF1, SNF2, SNF7, SNF8, SOK2, SRB10, SRB11, SRB8, SRB9, sreA, sreP, SRV2, SSD1, SSN6, SST2, STE11, STE12, STE20, STE50, STE7, STP22, SWI4, SWI6, tamA, TEC1, TPK1, TPK2, TPK3, TUP1, UaY, UGA3, URE2, VPS28, VPS36, WHI3, YMR077c, YNL255c, YPR1, ZAP1, genes encoding bacterial protein toxins, and any fungal homologs of the aforementioned genes.

[0192] In certain embodiments of the methods according to this aspect of the invention, the modulation is expression of a dominant mutation of the gene. The term “dominant mutation” is as used before. Preferred dominant mutations according to this aspect of the invention are as used before.

[0193] In certain embodiments of the methods according to this aspect of the invention, the modulation is mediated by a peptide modulator of gene expression. The term “peptide” is as used before. Peptides may be expressed in the cell or supplied exogenously. Preferably, they are provided on a scaffold to increase intracellular stability and to provide conformational constraint. Preferred peptides according to this aspect of the invention include those discussed earlier.

[0194] In certain embodiments of the methods according to this aspect of the invention, the peptide modulator is an activator of gene expression. The term “activator of gene expression” is as used before.

[0195] In certain embodiments of the methods according to this aspect of the invention, the peptide modulator is an inhibitor of gene expression. The term “inhibitor of gene expression” is as used before.

[0196] In certain embodiments of the methods according to this aspect of the invention, the modulation is mediated by a small molecule modulator of gene expression. In certain embodiments of the methods according to this aspect of the invention, the small molecule modulator is an activator of gene expression. The term “activator of gene expression” is as used before. In certain embodiments of the methods according to this aspect of the invention, the small molecule modulator is an inhibitor of gene expression. The term “inhibitor of gene expression” is as used before.

[0197] In certain embodiments of the methods according to this aspect of the invention, the modulation is conditional expression of the gene. The term “conditional expression” of a gene is as used before.

[0198] In certain embodiments of the methods according to this aspect of the invention, the gene either encodes a transcription factor or the product that it encodes acts on a transcription factor. The term “the gene acts on” is as used before. The term “transcription factor” is as used before. Preferred transcription factors include, without limitation, transcription factors that modulate the expression of genes involved in the production or response to the small molecule cAMP (preferred examples include, without limitation, Mga1, Msn2, Msn4, Sfl1, and Sok2); transcription factors that function downstream of mitogen-activated protein (MAP) kinase signaling pathways that regulate the yeast invasion response (preferred examples include, without limitation, Mcm1, Ste12, and Tec1); transcription factors that modulate the expression of genes involved in nitrogen regulation (preferred examples include, without limitation, AreA, Gln3, Hms1, Hms2, NreB, TamA, and Uga3); transcription factors that modulate the expression of genes involved in pH regulation in fungi (preferred examples include, without limitation PacC and Rim101); general transcription factors (preferred examples include, without limitation, Sin3, Snf2, Srb8, Srb9, Srb10, Srb11, Ssn6, and Tup1); transcription factors that modulate the expression of genes involved in carbon metabolism (preferred examples include, without limitation, Adr1, Cat8, CreA, FacB, Gcr1, Gcr2, Hap4, Mig1, Mig2, Mth1, Nrg1, Oaf1, and Sip4); heme-dependent transcription factors (preferred examples include, without limitation, Hap1 and Rox1); transcription factors that modulate the expression of genes involved in the

[0199] In certain embodiments of the methods according to this aspect of the invention, the gene either encodes a kinase or the product that it encodes acts on a kinase. The term “kinase” is as used before. Preferred kinases include, without limitation, Cdc28, Elm1, Fus3, Gcn2, Hog1, Hsl1, Hxk2, Kss1, Pbs2, Pho85, Rim15, Ste7, Sch9, Snf1, Ste11, Ste20, Tpk1, Tpk2, and Tpk3.

[0200] In certain embodiments of the methods according to this aspect of the invention, the gene either encodes a G-protein or the product that it encodes acts on a G-protein. The term “G-protein” is as used before. Preferred G-proteins include, without limitation Cdc42, FadA, Gpa1, Gpa2, Ras1, Ras2, Rho1, Rho2, Rho3, Rho4, and Rsr1.

[0201] In certain embodiments of the methods according to this aspect of the invention, the gene either encodes a cell surface receptor or the product that it encodes acts on a cell surface receptor. The term “cell surface receptor” is as used before. Preferred cell surface receptors include, without limitation, G-protein coupled receptors. Preferred G-protein coupled receptors include, without limitation, Gpr1.

[0202] In certain embodiments of the methods according to this aspect of the invention, the gene either encodes a GTPase activating protein or the product that it encodes acts on a GTPase activating protein. The term “GTPase activating protein” is as used before. Preferred GTPase activating proteins include, without limitation, RGS family members. The term “RGS family members” is as used before. Preferred RGS family members include, without limitation, FlbA, Rgs2, and Sst2. Preferred examples of non-RGS family GTPase-activating proteins include, without limitation, Bem2, Bem3, Bud2, Rga1, and Rga2.

[0203] In certain embodiments of the methods according to this aspect of the invention, the gene either encodes a guanine nucleotide exchange factor or the product that it encodes acts on a guanine nucleotide exchange factor. The term “guanine nucleotide exchange factor” is as used before. Preferred guanine nucleotide exchange factors include, without limitation, Bud5, Cdc24, and Cdc25.

[0204] In certain embodiments of the methods according to this aspect of the invention, the gene either encodes a phosphatase or the product that it encodes acts on a phosphatase. The term “phosphatase” is as used before. Preferred phosphatases include, without limitation, Cdc55 and Ptc1.

[0205] In certain embodiments of the methods according to this aspect of the invention, the gene either encodes a protease or the product that it encodes acts on a protease. The term “protease” is as used before. Preferred proteases include, without limitation, Rim13 and LF.

[0206] In certain embodiments of the methods according to this aspect of the invention, the gene either encodes a cyclic nucleotide phosphodiesterase or the product that it encodes acts on a cyclic nucleotide phosphodiesterase. The term “cyclic nucleotide phosphodiesterase” is as used before. Preferred examples of cyclic nucleotide phosphodiesterases include, without limitation, Pde2.

[0207] In certain embodiments of the methods according to this aspect of the invention, the gene either encodes a bacterial protein toxin or the product that it encodes acts on a bacterial protein toxin. The term “bacterial protein toxin” is as used before. Preferred bacterial protein toxins include, without limitation, Anthrax toxin edema factor (EF; Bacillus anthracis), Anthrax toxin lethal factor (LF; Bacillus anthracis), adenylate cyclase toxin (Bordetella pertussis), Cholera enterotoxin (Vibrio cholerae), LT toxin (Escherichia coli), ST toxin (E. coli), Shiga toxin (Shigella dysenteriae), Perfringens enterotoxin (Clostridium perfringens), Botulinum toxin (Clostridium botulinum), Tetanus toxin (Clostridium tetani), Diphtheria toxin (Corynebacterium diphtheriae), Exotoxin A (Pseudomonas aeruginosa), Exoenzyme S (P. aeruginosa), Pertussis toxin (Bordetella pertussis), alpha and epsilon toxins (C. perfringens), lethal toxin (LT; Clostridium sordellii), toxins A and B (Clostridium dificile), and phospholipase C (Clostridium bifermentans).

[0208] In certain embodiments of the methods according to this aspect of the invention, the gene either encodes an importin protein or the product that it encodes acts on an importin protein. The term “importin” protein is as used before. Preferred examples of importin proteins include, without limitation, Msn5.

[0209] In certain embodiments of the methods according to this aspect of the invention, the gene either encodes a RNA-binding protein or the product that it encodes acts on a RNA-binding protein. Preferred examples of RNA-binding proteins include, without limitation, Dhh1 and Whi3.

[0210] In certain embodiments of the methods according to this aspect of the invention, the gene either encodes a component of a SCF complex or the product that it encodes acts on a component of a SCF complex. The term “component of a SCF complex” is as used before. Preferred examples of components of a SCF complex include, without limitation, Grr1.

[0211] In certain embodiments of the methods according to this aspect of the invention, the gene either encodes an adherin or the product that it encodes acts on an adherin. The term “adherin” means a molecule that functions to promote the interaction of a cell with another component, including, without limitation, interaction with other cells of the same genotype, interaction with cells of a different genotype, and interaction with growth substrates. Preferred examples of adherins include, without limitation, Aga1, Aga2, Flo1, Flo10, Flo11, Flo5, and Flo9.

[0212] In certain embodiments of the methods according to this aspect of the invention, the gene either encodes or the gene product acts on a biosynthetic enzyme. In certain embodiments of the methods according to this aspect of the invention, the gene acts on biosynthetic enzyme for the secondary metabolite to be produced. The terms “biosynthetic enzyme” and “biosynthetic enzyme for the secondary metabolite to be produced” are as used before.

[0213] In certain embodiments of the methods according to this aspect of the invention, the secondary metabolite is an anti-bacterial. The term “anti-bacterial” is as used before. Preferred anti-bacterials include, without limitation, β-lactams. Preferred β-lactams include, without limitation, penicillins and cephalosporins. Preferred penicillins and biosynthetic intermediates include, without limitation, isopenicillin N, 6-aminopenicillanic acid (6-APA), penicillin G, penicillin N, and penicillin V. Preferred cephalosporins and biosynthetic intermediates include, without limitation, deacetoxycephalosporin V (DAOC V), deacetoxycephalosporin C (DAOC), deacetylcephalosporin C (DAC), 7-aminodeacetoxycephalosporanic acid (7-ADCA), cephalosporin C, 7-B-(5-carboxy-5-oxopentanamido)-cephalosporanic acid (keto-AD-7ACA), 7-B-(4-carboxybutanamido)-cephalosporanic acid (GL-7ACA), and 7-aminocephalosporanic acid (7ACA).

[0214] In certain embodiments of the methods according to this aspect of the invention, the secondary metabolite is an anti-hypercholesterolemic or a biosynthetic intermediate thereof. An “anti-hypercholesterolemic” is as used before. Preferred anti-hypercholesterolemics include, without limitation, lovastatin, mevastatin, simvastatin, and pravastatin.

[0215] In certain embodiments of the methods according to this aspect of the invention, the secondary metabolite is an immunosuppressant or a biosynthetic intermediate thereof. An “immunosuppressant” is as used before. Preferred immunosuppressants include, without limitation, members of the cyclosporin family and beauverolide L. Preferred cyclosporins include, without limitation, cyclosporin A and cyclosporin C.

[0216] In certain embodiments of the methods according to this aspect of the invention, the secondary metabolite is an ergot alkaloid or a biosynthetic intermediate thereof. The term “ergot alkaloid” is as used before. Preferred classes of ergot alkaloids include clavine alkaloids, lysergic acids, lysergic acid amides, and ergot peptide alkaloids. Preferred ergot alkaloids include, without limitation, ergotamine, ergosine, ergocristine, ergocryptine, ergocornine, ergotaminine, ergosinine, ergocristinine, ergocryptinine, ergocorninine, ergonovine, ergometrinine, and ergoclavine.

[0217] In certain embodiments of the methods according to this aspect of the invention, the secondary metabolite is an inhibitor of angiogenesis or a biosynthetic intermediate thereof. The term “inhibitor of angiogenesis” is as used before. Preferred inhibitors of angiogenesis include, without limitation, fumagillin and ovalicin.

[0218] In certain embodiments of the methods according to this aspect of the invention, the secondary metabolite is a glucan synthase inhibitor or a biosynthetic intermediate thereof. The term “glucan synthase inhibitor” is as used before. Preferred glucan synthase inhibitors include, without limitation, echinocandin B, pneumocandin B, aculeacin A, and papulacandin.

[0219] In certain embodiments of the methods according to this aspect of the invention, the secondary metabolite is a member of the gliotoxin family of compounds or a biosynthetic intermediate thereof. The term “gliotoxin family of compounds” is as used before. Preferred members of the “gliotoxin family of compounds” include, without limitation, gliotoxin and aspirochlorine.

[0220] In certain embodiments of the methods according to this aspect of the invention, the secondary metabolite is a fungal toxin or a biosynthetic intermediate thereof. The term “fungal toxin” is as used before. Preferred fungal toxins include, without limitation, aflatoxins, patulin, zearalenone, cytochalasin, griseofulvin, ergochrome, cercosporin, marticin, xanthocillin, coumarins, tricothecenes, fusidanes, sesterpenes, amatoxins, malformin A, phallotoxins, pentoxin, HC toxin, psilocybin, bufotenine, lysergic acid, sporodesmin, pulcheriminic acid, sordarins, fumonisins, ochratoxin A, and fusaric acid.

[0221] In certain embodiments of the methods according to this aspect of the invention, the secondary metabolite is a modulator of cell surface receptor signaling or a biosynthetic intermediate thereof. The term “cell surface receptor” is as used before. Preferred modulators of cell surface signaling include, without limitation, the insulin receptor agonist L-783,281 and the cholecystokinin receptor antagonist asperlicin.

[0222] In certain embodiments of the methods according to this aspect of the invention, the secondary metabolite is a plant growth regulator or a biosynthetic intermediate thereof. The term “plant growth regulator” is as used before. Preferred plant growth regulators include, without limitation, cytokinin, auxin, gibberellin, abscisic acid, and ethylene.

[0223] In certain embodiments of the methods according to this aspect of the invention, the secondary metabolite is a pigment or a biosynthetic intermediate thereof. The term “pigment” is as defined before. Preferred pigments include, without limitation, melanins and carotenoids.

[0224] In certain embodiments of the methods according to this aspect of the invention, the secondary metabolite is an insecticide or a biosynthetic intermediate thereof. The term “insecticide” is as used before. Preferred insecticides include, without limitation, nodulisporic acid.

[0225] In certain embodiments of the methods according to this aspect of the invention, the secondary metabolite is an anti-neoplastic compound or a biosynthetic intermediate thereof. The term “anti-neoplastic” compound is as used before. Preferred anti-neoplastic compounds include, without limitation, taxol (paclitaxel) and related taxoids.

[0226] In certain embodiments of the methods according to this aspect of the invention, the gene is selected from the group consisting of AAD34561, abaA, ACE2, ADR1, AFL1, aflR, AFT1, AGA1, AGA2, amyR, areA, ASH1, BAP2, BCY1, BEM1, BEM2, BEM3, BNI1, BUD2, BUD5, CAT8, CDC24, CDC25, CDC28, CDC42, CDC55, CLB2, creA, CTS1, CUP9, CYR1, DFG16, DHH1, DPH3, ELM1, facB, FLO1, FLO10, FLO11, FLO5, FLO8, FLO9, FUS3, GCN2, GCN4, GCR1, GCR2, GIC1, GIC2, GLN3, GPA1, GPA2, GPR1, GRR1, GTS1, HAP1, HAP4, HIP1, HMS1, HMS2, HOG1, HSL1, HXK2, IME1, IME4, INO2, INV11, INV13, INV16, INV5, INV7, INV9, KSS1, LEU3, lovE, LYS14, MAC1, MCM1, MEP1, MEP2, MET28, MET31, MET4, metR, MGA1, MIG1, MIG2, MSN1, MSN2, MSN4, MSN5, MSS11, MTH1, NPR1, nreB, NRG1, OAF1, pacC, PBS2, PDE2, PET9, PHD1, PHO2, PHO4, PHO85, pkaR, PPR1, PTC1, PUT3, RAS1, RAS2, RGA1, RGS2, RHO1, RHO2, RHO3, RHO4, RIM101, RIM13, RIM15, RIM9, ROX1, RRE1, RSR1, SCH9, sconB, SFL1, SHO1, SHR3, SIN3, SIP4, SKN7, SNF1, SNF2, SNF7, SNF8, SOK2, SRB10, SRB11, SRB8, SRB9, sreA, sreP, SRV2, SSD1, SSN6, SST2, STE11, STE12, STE20, STE50, STE7, STP22, SWI4, SWI6, tamA, TEC1, TPK1, TPK2, TPK3, TUP1, UaY, UGA3, URE2, VPS28, VPS36, WHI3, YMR077c, YNL255c, YPR1, ZAP1, genes encoding bacterial protein toxins, and any fungal homologs of the aforementioned genes. The term “fungal homolog” is as used before.

[0227] In certain embodiments of the methods according to this aspect of the invention, the methods further comprise purifying the secondary metabolite from a culture of the fungus. The term “purifying” is as used before.

[0228] In a sixth aspect, the invention provides methods for improving production of a secondary metabolite in a fungus by causing conditional lysis of the fungus, the method comprising modulating the expression of a gene involved in regulation of secondary metabolite production in a manner that causes conditional lysis. “Causing conditional lysis” means causing the fungus to grow without lysis under a first set of growth conditions and to lyse under a second and different set of conditions, which are not lytic to the unmodified fungus. In preferred embodiments, the conditions that can be altered between the first and second growth conditions include, without limitation, the source or amount of nutrients such as carbon, nitrogen, and phosphate; the source or amount of specific enzymes; the source or amount of specific components found in cell walls; the amount of salts or osmolytes; the pH of the medium, the partial oxygen pressure, or temperature; and the amount of specific small molecules.

[0229] In certain embodiments of the methods according to this aspect of the invention, the modulation is overexpression of the gene. “Overexpression of the gene” is as used before. Preferred genes according to this aspect of the invention include, without limitation, ACE2, BCK1, BGL2, CHS1, CHS2, CHS3, CTS1, FKS1, GSC2, HOG1, ISR1, KRE6, MID2, MKK1, MKK2, PBS2, PKC1, PPH21, PPH22, PPZ1, PPZ2, PTP2, PTP3, RHO1, RLM1, ROM1, ROM2, SHO1, SKN1, SLG1, SLN1, SLT2, SMP1, SSK1, SSK2, SSK22, STE1, STT3, STT4, SWI4, SWI6, VPS45, WSC2, WSC3, WSC4, and YPD1.

[0230] In certain embodiments of the methods according to this aspect of the invention, the modulation is expression of a dominant mutation of the gene. The term “dominant mutation” is as used before. Preferred dominant mutations according to this aspect of the invention are as used before.

[0231] In certain embodiments of the methods according to this aspect of the invention, the modulation is mediated by a peptide modulator of gene expression. The term “peptide” is as used before. Peptides may be expressed in the cell or supplied exogenously. Preferably, they are provided on a scaffold to increase intracellular stability and to provide conformational constraint. Preferred peptides according to this aspect of the invention include those discussed earlier.

[0232] In certain embodiments of the methods according to this aspect of the invention, the peptide modulator is an activator of gene expression. The term “activator of gene expression” is as used before.

[0233] In certain embodiments of the methods according to this aspect of the invention, the peptide modulator is an inhibitor of gene expression. The term “inhibitor of gene expression” is as used before.

[0234] In certain embodiments of the methods according to this aspect of the invention, the modulation is mediated by a small molecule modulator of gene expression. In certain embodiments of the methods according to this aspect of the invention, the small molecule modulator is an activator of gene expression. The term “activator of gene expression” is as used before. In certain embodiments of the methods according to this aspect of the invention, the small molecule modulator is an inhibitor of gene expression. The term “inhibitor of gene expression” is as used before.

[0235] In certain embodiments of the methods according to this aspect of the invention, the modulation is conditional expression of the gene. The term “conditional expression” of a gene is as used before.

[0236] In certain embodiments of the methods according to this aspect of the invention, the gene either encodes a transcription factor or the product that it encodes acts on a transcription factor. The term “transcription factor” is as used before. Preferred transcription factors include, without limitation, Ace2, Rlm1, Smp1, Swi4, and Swi6.

[0237] In certain embodiments of the methods according to this aspect of the invention, the gene either encodes a transmembrane transporter or the product that it encodes acts on a transmembrane transporter. A “transmembrane transporter” is as used before.

[0238] In certain embodiments of the methods according to this aspect of the invention, the gene either encodes a kinase or the product that it encodes acts on a kinase. A “kinase” is as used before. Preferred kinases include, without limitation, Bck1, Hog1, Isr1, Mkk1, Mkk2, Pbs2, Pkc1, Slt2, Ssk2, and Ssk22.

[0239] In certain embodiments of the methods according to this aspect of the invention, the gene either encodes a component involved in cell wall biosynthesis or the product that it encodes acts on a component involved in cell wall biosynthesis. Preferred classes of components involved in cell wall biosynthesis include, without limitation, glucan synthases, glucanases, chitin synthase, and chitinases. Preferred examples of components involved in cell wall biosynthesis include, without limitation, Bgl2, Chs1, Chs2, Chs3, Cts1, Fks1, Gsc2, Kre6, and Skn1.

[0240] In certain embodiments of the methods according to this aspect of the invention, the gene either encodes a G-protein or the product that it encodes acts on a G-protein. A “G-protein” is a guanyl-nucleotide binding protein. Preferred G-proteins include, without limitation Rho1.

[0241] In certain embodiments of the methods according to this aspect of the invention, the gene either encodes a cell surface receptor or the product that it encodes acts on a cell surface receptor. A “cell surface receptor” is as used before. Preferred cell surface receptors include, without limitation, Sho1 and Sln1.

[0242] In certain embodiments of the methods according to this aspect of the invention, the gene either encodes a GTPase activating protein or the product that it encodes acts on a GTPase activating protein. A “GTPase activating protein” is as used before.

[0243] In certain embodiments of the methods according to this aspect of the invention, the gene either encodes a guanine nucleotide exchange factor or the product that it encodes acts on a guanine nucleotide exchange factor. A “guanine nucleotide exchange factor” is as used before. Preferred guanine nucleotide exchange factors include, without limitation, Rom1 and Rom2.

[0244] In certain embodiments of the methods according to this aspect of the invention, the gene either encodes a phosphatase or the product that it encodes acts on a phosphatase. A “phosphatase” is as used before. Preferred phosphatases include, without limitation, Pph21, Pph22, Ppz1, Ppz2, Ptp2, Ptp3, and Ptc1.

[0245] In certain embodiments of the methods according to this aspect of the invention, the gene either encodes a protease or the product that it encodes acts on a protease. A “protease” is as used before.

[0246] In certain embodiments of the methods according to this aspect of the invention, the gene either encodes a cyclic nucleotide phosphodiesterase or the product that it encodes acts on a cyclic nucleotide phosphodiesterase. A “cyclic nucleotide phosphodiesterase” is as used before.

[0247] In certain embodiments of the methods according to this aspect of the invention, the gene either encodes a bacterial protein toxin or the product that it encodes acts on a bacterial protein toxin. A “bacterial protein toxin” is as used before.

[0248] In certain embodiments of the methods according to this aspect of the invention, the gene either encodes an importin or the product that it encodes acts on an importin protein. A “importin” protein is as used before.

[0249] In certain embodiments of the methods according to this aspect of the invention, the gene either encodes a RNA-binding protein or the product that it encodes acts on a RNA-binding protein.

[0250] In certain embodiments of the methods according to this aspect of the invention, the gene either encodes a component of a SCF complex or the product that it encodes acts on a component of a SCF complex. A “component of a SCF complex” is as used before.

[0251] In certain embodiments of the methods according to this aspect of the invention, the gene either encodes or the gene product acts on a biosynthetic enzyme. In certain embodiments of the methods according to this aspect of the invention, the gene acts on biosynthetic enzyme for the secondary metabolite to be produced. The terms “biosynthetic enzyme” and “biosynthetic enzyme for the secondary metabolite to be produced” are as used before.

[0252] In certain embodiments of the methods according to this aspect of the invention, the secondary metabolite is an anti-bacterial. The term “anti-bacterial” is as used before. Preferred anti-bacterials include, without limitation, β-lactams. Preferred β-lactams include, without limitation, penicillins and cephalosporins. Preferred penicillins and biosynthetic intermediates include, without limitation, isopenicillin N, 6-aminopenicillanic acid (6-APA), penicillin G, penicillin N, and penicillin V. Preferred cephalosporins and biosynthetic intermediates include, without limitation, deacetoxycephalosporin V (DAOC V), deacetoxycephalosporin C (DAOC), deacetylcephalosporin C (DAC), 7-aminodeacetoxycephalosporanic acid (7-ADCA), cephalosporin C, 7-B-(5-carboxy-5-oxopentanamido)-cephalosporanic acid (keto-AD-7ACA), 7-B-(4-carboxybutanamido)-cephalosporanic acid (GL-7ACA), and 7-aminocephalosporanic acid (7ACA).

[0253] In certain embodiments of the methods according to this aspect of the invention, the secondary metabolite is an anti-hypercholesterolemic or a biosynthetic intermediate thereof. An “anti-hypercholesterolemic” is as used before. Preferred anti-hypercholesterolemics include, without limitation, lovastatin, mevastatin, simvastatin, and pravastatin.

[0254] In certain embodiments of the methods according to this aspect of the invention, the secondary metabolite is an immunosuppressant or a biosynthetic intermediate thereof. An “immunosuppressant” is as used before. Preferred immunosuppressants include, without limitation, members of the cyclosporin family and beauverolide L. Preferred cyclosporins include, without limitation, cyclosporin A and cyclosporin C.

[0255] In certain embodiments of the methods according to this aspect of the invention, the secondary metabolite is an ergot alkaloid or a biosynthetic intermediate thereof. The term “ergot alkaloid” is as used before. Preferred classes of ergot alkaloids include clavine alkaloids, lysergic acids, lysergic acid amides, and ergot peptide alkaloids. Preferred ergot alkaloids include, without limitation, ergotamine, ergosine, ergocristine, ergocryptine, ergocornine, ergotaminine, ergosinine, ergocristinine, ergocryptinine, ergocominine, ergonovine, ergometrinine, and ergoclavine.

[0256] In certain embodiments of the methods according to this aspect of the invention, the secondary metabolite is an inhibitor of angiogenesis or a biosynthetic intermediate thereof. The term “inhibitor of angiogenesis” is as used before. Preferred inhibitors of angiogenesis include, without limitation, fumagillin and ovalicin.

[0257] In certain embodiments of the methods according to this aspect of the invention, the secondary metabolite is a glucan synthase inhibitor or a biosynthetic intermediate thereof. The term “glucan synthase inhibitor” is as used before. Preferred glucan synthase inhibitors include, without limitation, echinocandin B, pneumocandin B, aculeacin A, and papulacandin.

[0258] In certain embodiments of the methods according to this aspect of the invention, the secondary metabolite is a member of the gliotoxin family of compounds or a biosynthetic intermediate thereof. The term “gliotoxin family of compounds” is as used before. Preferred members of the “gliotoxin family of compounds” include, without limitation, gliotoxin and aspirochlorine.

[0259] In certain embodiments of the methods according to this aspect of the invention, the secondary metabolite is a fungal toxin or a biosynthetic intermediate thereof. The term “fungal toxin” is as used before. Preferred fungal toxins include, without limitation, aflatoxins, patulin, zearalenone, cytochalasin, griseofulvin, ergochrome, cercosporin, marticin, xanthocillin, coumarins, tricothecenes, fusidanes, sesterpenes, amatoxins, malformin A, phallotoxins, pentoxin, HC toxin, psilocybin, bufotenine, lysergic acid, sporodesmin, pulcheriminic acid, sordarins, fumonisins, ochratoxin A, and fusaric acid.

[0260] In certain embodiments of the methods according to this aspect of the invention, the secondary metabolite is a modulator of cell surface receptor signaling or a biosynthetic intermediate thereof. The term “cell surface receptor” is as used before. Preferred modulators of cell surface signaling include, without limitation, the insulin receptor agonist L-783,281 and the cholecystokinin receptor antagonist asperlicin.

[0261] In certain embodiments of the methods according to this aspect of the invention, the secondary metabolite is a plant growth regulator or a biosynthetic intermediate thereof. The term “plant growth regulator” is as used before. Preferred plant growth regulators include, without limitation, cytokinin, auxin, gibberellin, abscisic acid, and ethylene.

[0262] In certain embodiments of the methods according to this aspect of the invention, the secondary metabolite is a pigment or a biosynthetic intermediate thereof. The term “pigment” is as defined before. Preferred pigments include, without limitation, melanins and carotenoids.

[0263] In certain embodiments of the methods according to this aspect of the invention, the secondary metabolite is an insecticide or a biosynthetic intermediate thereof. The term “insecticide” is as used before. Preferred insecticides include, without limitation, nodulisporic acid.

[0264] In certain embodiments of the methods according to this aspect of the invention, the secondary metabolite is an anti-neoplastic compound or a biosynthetic intermediate thereof. The term “anti-neoplastic” compound is as used before. Preferred anti-neoplastic compounds include, without limitation, taxol (paclitaxel) and related taxoids.

[0265] In certain embodiments of the methods according to this aspect of the invention, the gene is selected from the group consisting of ACE2, BCK1, BGL2, CHS1, CHS2, CHS3, CTS1, FKS1, GSC2, HOG1, ISR1, KRE6, MID2, MKK1, MKK2, PBS2, PKC1, PPH21, PPH22, PPZ1, PPZ2, PTP2, PTP3, RHO1, RLM1, ROM1, ROM2, SHO1, SKN1, SLG1, SLN1, SLT2, SMP1, SSK1, SSK2, SSK22, STE11, STT3, STT4, SWI4, SWI6, VPS45, WSC2, WSC3, WSC4, YPD1, and fungal homologs of the aforementioned genes. The term “fungal homolog” is as used before.

[0266] In certain embodiments of the methods according to this aspect of the invention, the methods further comprise purifying the secondary metabolite from a culture of the fungus. The term “purifying” is as used before.

[0267] In a seventh aspect, the invention provides methods for improving production of a secondary metabolite in a fungus by increasing the resistance of the fungus to the deleterious effects of exposure to a secondary metabolite made by the same organism, the method comprising modulating the expression of a gene involved in regulation of secondary metabolite production in a manner that increases resistance to the deleterious effects of exposure to a secondary metabolite. “Increasing the resistance of the fungus to the deleterious effects of exposure to a secondary metabolite” means to allow the fungus to survive, grow, or produce secondary metabolite in conditions that otherwise would be toxic or prevent production of secondary metabolite.

[0268] In certain embodiments of the methods according to this aspect of the invention, the modulation is overexpression of the gene. “Overexpression of the gene” is as used before. Preferred genes according to this aspect of the invention include, without limitation, AAD34558, AAD34561, AAD34564, ATR1, ERG6, ERG11, FCR1, GCN4, lovE, MDR1, PDR1, PDR3, PDR5, PDR10, PDR13, SNQ2, TRI12, YAP1, fungal homologs of the aforementioned genes, and genes that encode β-tubulin, calcineurin (including, without limitation, CNA1), chitin synthase, glucan synthase, HMG CoA reductase, N-terminal aminopeptidases, and RNA polymerase II.

[0269] In certain embodiments of the methods according to this aspect of the invention, the modulation is expression of a dominant mutation of the gene. The term “dominant mutation” is as used before. Preferred dominant mutations according to this aspect of the invention are as used before.

[0270] In certain embodiments of the methods according to this aspect of the invention, the modulation is mediated by a peptide modulator of gene expression. The term “peptide” is as used before. Peptides may be expressed in the cell or supplied exogenously. Preferably, they are provided on a scaffold to increase intracellular stability and to provide conformational constraint. Preferred peptides according to this aspect of the invention include those discussed earlier.

[0271] In certain embodiments of the methods according to this aspect of the invention, the peptide modulator is an activator of gene expression. The term “activator of gene expression” is as used before.

[0272] In certain embodiments of the methods according to this aspect of the invention, the peptide modulator is an inhibitor of gene expression. The term “inhibitor of gene expression” is as used before.

[0273] In certain embodiments of the methods according to this aspect of the invention, the modulation is mediated by a small molecule modulator of gene expression. In certain embodiments of the methods according to this aspect of the invention, the small molecule modulator is an activator of gene expression. The term “activator of gene expression” is as used before. In certain embodiments of the methods according to this aspect of the invention, the small molecule modulator is an inhibitor of gene expression. The term “inhibitor of gene expression” is as used before.

[0274] In certain embodiments of the methods according to this aspect of the invention, the modulation is conditional expression of the gene. The term “conditional expression” of a gene is as used before.

[0275] In certain embodiments of the methods according to this aspect of the invention, the gene either encodes a transcription factor or the product that it encodes acts on a transcription factor. The term “transcription factor” is as used before. Preferred transcription factors include, without limitation, AAD34561, Fcr1, Gcn4, LovE, Pdr1, Pdr3, and Yap1.

[0276] In certain embodiments of the methods according to this aspect of the invention, the gene either encodes a transmembrane transporter or the product that it encodes acts on a transmembrane transporter. The term “transmembrane transporter” is as used before. Preferred transmembrane transporters include, without limitation, AAD34558, AAD34564, Atr1, Mdr1, Pdr5, Pdr10, Snq2, and Tri12.

[0277] In certain embodiments of the methods according to this aspect of the invention, the gene either encodes a kinase or the product that it encodes acts on a kinase. A “kinase” is as used before.

[0278] In certain embodiments of the methods according to this aspect of the invention, the gene either encodes a G-protein or the product that it encodes acts on a G-protein. A “G-protein” is as used before.

[0279] In certain embodiments of the methods according to this aspect of the invention, the gene either encodes a cell surface receptor or the product that it encodes acts on a cell surface receptor. A “cell surface receptor” is as used before.

[0280] In certain embodiments of the methods according to this aspect of the invention, the gene either encodes a GTPase activating protein or the product that it encodes acts on a GTPase activating protein. A “GTPase activating protein” is as used before.

[0281] In certain embodiments of the methods according to this aspect of the invention, the gene either encodes a guanine nucleotide exchange factor or the product that it encodes acts on a guanine nucleotide exchange factor. A “guanine nucleotide exchange factor” is as used before.

[0282] In certain embodiments of the methods according to this aspect of the invention, the gene either encodes a phosphatase or the product that it encodes acts on a phosphatase. A “phosphatase” is as used before.

[0283] In certain embodiments of the methods according to this aspect of the invention, the gene either encodes a protease or the product that it encodes acts on a protease. A “protease” is as used before.

[0284] In certain embodiments of the methods according to this aspect of the invention, the gene either encodes a cyclic nucleotide phosphodiesterase or the product that it encodes acts on a cyclic nucleotide phosphodiesterase. A “cyclic nucleotide phosphodiesterase” is as used before.

[0285] In certain embodiments of the methods according to this aspect of the invention, the gene either encodes a bacterial protein toxin or the product that it encodes acts on a bacterial protein toxin. A “bacterial protein toxin” is as used before.

[0286] In certain embodiments of the methods according to this aspect of the invention, the gene either encodes an importin protein or the product that it encodes acts on an importin protein. An “importin” protein is as used before.

[0287] In certain embodiments of the methods according to this aspect of the invention, the gene either encodes a RNA-binding protein or the product that it encodes acts on a RNA-binding protein.

[0288] In certain embodiments of the methods according to this aspect of the invention, the gene either encodes a component of a SCF complex or the product that it encodes acts on a component of a SCF complex. A “component of a SCF complex” is as used before.

[0289] In certain embodiments of the methods according to this aspect of the invention, the gene either encodes or the gene product acts on a biosynthetic enzyme. In certain embodiments of the methods according to this aspect of the invention, the gene acts on biosynthetic enzyme for the secondary metabolite to be produced. The terms “biosynthetic enzyme” and “biosynthetic enzyme for the secondary metabolite to be produced” are as used before.

[0290] In certain embodiments of the methods according to this aspect of the invention, the secondary metabolite is an anti-bacterial. The term “anti-bacterial” is as used before. Preferred anti-bacterials include, without limitation, β-lactams. Preferred β-lactams include, without limitation, penicillins and cephalosporins. Preferred penicillins and biosynthetic intermediates include, without limitation, isopenicillin N, 6-aminopenicillanic acid (6-APA), penicillin G, penicillin N, and penicillin V. Preferred cephalosporins and biosynthetic intermediates include, without limitation, deacetoxycephalosporin V (DAOC V), deacetoxycephalosporin C (DAOC), deacetylcephalosporin C (DAC), 7-aminodeacetoxycephalosporanic acid (7-ADCA), cephalosporin C, 7-B-(5-carboxy-5-oxopentanamido)-cephalosporanic acid (keto-AD-7ACA), 7-B-(4-carboxybutanamido)-cephalosporanic acid (GL-7ACA), and 7-aminocephalosporanic acid (7ACA).

[0291] In certain embodiments of the methods according to this aspect of the invention, the secondary metabolite is an anti-hypercholesterolemic or a biosynthetic intermediate thereof. An “anti-hypercholesterolemic” is as used before. Preferred anti-hypercholesterolemics include, without limitation, lovastatin, mevastatin, simvastatin, and pravastatin.

[0292] In certain embodiments of the methods according to this aspect of the invention, the secondary metabolite is an immunosuppressant or a biosynthetic intermediate thereof. An “immunosuppressant” is as used before. Preferred immunosuppressants include, without limitation, members of the cyclosporin family and beauverolide L. Preferred cyclosporins include, without limitation, cyclosporin A and cyclosporin C.

[0293] In certain embodiments of the methods according to this aspect of the invention, the secondary metabolite is an ergot alkaloid or a biosynthetic intermediate thereof. The term “ergot alkaloid” is as used before. Preferred classes of ergot alkaloids include clavine alkaloids, lysergic acids, lysergic acid amides, and ergot peptide alkaloids. Preferred ergot alkaloids include, without limitation, ergotamine, ergosine, ergocristine, ergocryptine, ergocornine, ergotaminine, ergosinine, ergocristinine, ergocryptinine, ergocominine, ergonovine, ergometrinine, and ergoclavine.

[0294] In certain embodiments of the methods according to this aspect of the invention, the secondary metabolite is an inhibitor of angiogenesis or a biosynthetic intermediate thereof. The term “inhibitor of angiogenesis” is as used before. Preferred inhibitors of angiogenesis include, without limitation, fumagillin and ovalicin.

[0295] In certain embodiments of the methods according to this aspect of the invention, the secondary metabolite is a glucan synthase inhibitor or a biosynthetic intermediate thereof. The term “glucan synthase inhibitor” is as used before. Preferred glucan synthase inhibitors include, without limitation, echinocandin B, pneumocandin B, aculeacin A, and papulacandin.

[0296] In certain embodiments of the methods according to this aspect of the invention, the secondary metabolite is a member of the gliotoxin family of compounds or a biosynthetic intermediate, thereof. The term “gliotoxin family of compounds” is as used before. Preferred members of the “gliotoxin family of compounds” include, without limitation, gliotoxin and aspirochlorine.

[0297] In certain embodiments of the methods according to this aspect of the invention, the secondary metabolite is a fungal toxin or a biosynthetic intermediate thereof. The term “fungal toxin” is as used before. Preferred fungal toxins include, without limitation, aflatoxins, patulin, zearalenone, cytochalasin, griseofulvin, ergochrome, cercosporin, marticin, xanthocillin, coumarins, tricothecenes, fusidanes, sesterpenes, amatoxins, malformin A, phallotoxins, pentoxin, HC toxin, psilocybin, bufotenine, lysergic acid, sporodesmin, pulcheriminic acid, sordarins, fumonisins, ochratoxin A, and fusaric acid.

[0298] In certain embodiments of the methods according to this aspect of the invention, the secondary metabolite is a modulator of cell surface receptor signaling or a biosynthetic intermediate thereof. The term “cell surface receptor” is as used before. Preferred modulators of cell surface signaling include, without limitation, the insulin receptor agonist L-783,281 and the cholecystokinin receptor antagonist asperlicin.

[0299] In certain embodiments of the methods according to this aspect of the invention, the secondary metabolite is a plant growth regulator or a biosynthetic intermediate thereof. The term “plant growth regulator” is as used before. Preferred plant growth regulators include, without limitation, cytokinin, auxin, gibberellin, abscisic acid, and ethylene.

[0300] In certain embodiments of the methods according to this aspect of the invention, the secondary metabolite is a pigment or a biosynthetic intermediate thereof. The term “pigment” is as defined before. Preferred pigments include, without limitation, melanins and carotenoids.

[0301] In certain embodiments of the methods according to this aspect of the invention, the secondary metabolite is an insecticide or a biosynthetic intermediate thereof. The term “insecticide” is as used before. Preferred insecticides include, without limitation, nodulisporic acid.

[0302] In certain embodiments of the methods according to this aspect of the invention, the secondary metabolite is an anti-neoplastic compound or a biosynthetic intermediate thereof. The term “anti-neoplastic” compound is as used before. Preferred anti-neoplastic compounds include, without limitation, taxol (paclitaxel) and related taxoids.

[0303] In certain embodiments of the methods according to this aspect of the invention, the gene is selected from the group consisting of AAD34558, AAD34561, AAD34564, ATR1, ERG6, ERG11, FCR1, GCN4, lovE, MDR1, PDR1, PDR3, PDR5, PDR10, PDR13, SNQ2, TRI12, YAP1, fungal homologs of the aforementioned genes, and genes that encode beta-tubulin, calcineurin (including, without limitation, CNA1), chitin synthase, glucan synthase, HMG CoA reductase, N-terminal aminopeptidases, and RNA polymerase II.

[0304] In certain embodiments of the methods according to this aspect of the invention, the methods further comprise purifying the secondary metabolite from a culture of the fungus. The term “purifying” is as used before.

[0305] In an eighth aspect, the invention provides genetically modified fungi, wherein the genetically modified fungi have an ability to produce secondary metabolites and the ability of the genetically modified fungus to produce secondary metabolites has been improved by any of the methods according to the invention.

[0306] In a ninth aspect, the invention provides a method for making a secondary metabolite, the method comprising culturing a fungus that is genetically modified according to the invention under conditions suitable for the production of secondary metabolites. “Conditions suitable for the production of secondary metabolites” means culture conditions under which the fungus does in fact produce one or more secondary metabolite.

[0307] The following examples are intended to further illustrate certain preferred embodiments of the invention and are not intended to limit the scope of the invention in any way.

### Example 1

[0308] Alteration of regulatory pathways modulating secondary metabolite production holds great promise to increase both the yield and productivity of secondary metabolites during fermentation. Importantly, enzymes required for biosynthesis of different metabolites during primary and secondary metabolism are often differentially regulated. For example, the plant Ruta graveolens has two different anthranilate synthase genes; one is expressed during primary metabolism to make tryptophan, whereas the second is specifically induced during secondary metabolism to promote the synthesis of acridone alkaloids (Bohlmann et al., Plant J. 7: 491-501 (1995)). Additionally, the lignin-degrading fungus Phanerochaete chrysosporium produces both manganese and lignin peroxidases during secondary metabolism. These peroxidases are induced differentially, both temporally and quantitatively, in response to carbon and nitrogen limitation (Pease et al., J. Bacteriol. 174: 3532-3540 (1992)). Expression of both manganese and lignin peroxidase families is induced by a rise in intracellular cAMP levels, although levels of cAMP required to induce lignin peroxidases are higher than those required to induce manganese peroxidases (Boominathan et al., Proc. Natl. Acad. Sci. USA 89: 5586-5590 (1992)). These and other examples of differential regulation of both primary and secondary metabolism and the biosynthesis of different secondary metabolites suggest that it is possible to inhibit the production of non-desirable primary and secondary metabolites while increasing the production of desirable secondary metabolites.

[0309] The fungus Aspergillus terreus produces a variety of secondary metabolites, including the polyketides lovastatin (Moore et al., J. Amer. Chem. Soc. 107: 3694-3701 (1985)), sulochrin (Curtis et al., J. Chem. Soc. [Perkin 1] 2:240-4 (1972)), and patulin (Borkowska Opacka and Escoula, Ann. Rech. Vet. 8: 129-33 (1977)). Lovastatin and its semisynthetic derivatives are widely prescribed and effective antihypercholesterolemic agents that are commercially produced by fermentation of A. terreus. It is thus desirable to develop strains of A. terreus that synthesize increased yields of lovastatin, with increased productivity and decreased levels of undesirable metabolites. Decreasing synthesis of alternative secondary metabolites can serve to both increase the primary metabolite pools available for lovastatin biosynthesis and to simplify purification of lovastatin from other metabolites in the fermentation broth.

[0310] It is possible to modulate the expression of a variety of regulators of secondary metabolism in order to increase lovastatin yield and productivity and decrease synthesis of non-desirable metabolites such as sulochrin in a fermentation of A. terreus. In one example, presented without limitation, overexpression of a cAMP-dependent protein kinase encoded by the Saccharomyces cerevisiae gene TPK2 is used. In wild-type S. cerevisiae, the intracellular levels of cAMP regulate Tpk2 activity. Under low concentrations of intracellular cAMP, Tpk2 is associated with Bcy1, a repressor of Tpk2 activity (Kuret et al., J. Biol. Chem. 263: 9149-54 (1988)). Association of cAMP with Bcy1 under conditions of elevated levels of intracellular levels of cAMP causes Bcy1 to dissociate from Tpk2, leading to activation of this kinase. Overexpression of TPK2 can override the cAMP requirement for activation of Tpk2 (Pan and Heitman, Mol. Cell. Biol. 19: 4874-87 (1999); Robertson and Fink, Proc. Natl. Acad. Sci. USA 95: 13783-7 (1998)).

[0311] To overexpress TPK2 in Aspergillus terreus, TPK2 is amplified using the polymerase chain reaction (PCR) with primers TPK2-1 5′-GAATTCATGGAATTCGTTGCAGAAAG-3′ (SEQ ID NO: 1) and TPK2-2 5′-GGATCCTTAGAAATCTTGAAAGTATT-3′ (SEQ ID NO: 2) using Turbo Pfu Polymerase (Stratagene) under standard reaction conditions described by the manufacturer. The resultant product is digested with restriction enzymes BamHI and EcoRI and cloned directly into BamHI/EcoRI-digested pLXZ161 DNA using methods well known to those skilled in the art, to generate plasmid pTPK2phleo. pLXZ161 is a gene vector derived from pBC-phleo (P. Silar, Fungal Genetics Newsletter 42: 73 (1995)) that carries a phleomycin resistance cassette for selection of transformants in A. terreus, as well as a polylinker located between the Aspergillus nidulans PGK promoter and the A. nidulans trpC terminator. pLXZ161 is constructed as follows: First, the Aspergillus nidulans trpC terminator is amplified from A. nidulans genomic DNA by the polymerase chain reaction (PCR) using Turbo Pfu Polymerase as described by the manufacturer (Stratagene). Primers used in this reaction are TRPC-1 5′-GCGGCCGCGGCGCCCGGCCCATGTCAACAAGAAT-3′(SEQ ID NO: 3) and TRPC-2 5′-CCGCGGCCGAGTGGAGATGTGGAGT-3′ (SEQ ID NO: 4). The resultant product is digested with the restriction enzymes SacII and NotI, purified by agarose gel electrophoresis, and cloned into SacII/NotI-digested pBC-phleo DNA using methods well known to those skilled in the art, to generate pLXZ116. Second, the A. nidulans PGK promoter is amplified from A. nidulans genomic DNA by PCR using primers PGK1-1 5′-CATGGGGCCCCGTGATGTCTACCTGCCCAC-3′ (SEQ ID NO: 5) and PGK1-2 5′-CATGATCGATTGTGGGTAGTTAATGGTATG-3′ (SEQ ID NO: 6), Turbo Pfu Polymerase, and reaction conditions as described above. The resultant product is digested with ApaI and ClaI and cloned into ApaI/ClaI-digested pLXZ116 using methods well known to those skilled in the art, to generate pLXZ161.

[0312] For transformation of A. terreus, spores are first generated by culture of ATCC 20542 on petri plates containing potato dextrose agar (Difco) at 30° C. for 3-6 days. Spores are removed from PDA either by resuspension in sterile water or Tween-80 (0.1%) or by scraping directly from the plate using a sterile spatula. Yeast extract sucrose medium, or YES (2% Yeast Extract, 6% Sucrose), is inoculated to a density of 1-5×10⁶ spores per ml and incubated with shaking in an Erlenmeyer flask at 26-30° C. for 12-16 hr (250 rpm). Mycelium is harvested by centrifugation at 3200 rpm for 10 minutes, and washed in sterile water two times. Mycelium is resuspended in a filter sterilized solution of Novozyme 234 (Sigma) at 2-5 mg/ml in 1 M MgSO₄ and digested at room temperature with shaking (80 rpm) for 1-2 hr. Undigested material is removed from the digest by filtration through Miracloth (Calbiochem). After adding 1-2 volumes of STC (0.8 M sorbitol, 25 mm Tris, pH 7.5, and 25 mM CaCl₂), the protoplasts are pelleted by centrifugation at 2500 rpm. Protoplasts are washed 2 times in STC by centrifugation. Resulting protoplasts are resuspended to a density of 5×10⁷ per ml in a solution of STC, SPTC (40% polyethylene glycol in STC) and DMSO in a ratio of 9:1:0.1 and frozen at −80° C.

[0313] Two aliquots (100 μl each) of protoplasts are mixed with 1-5 ug of either pTPK2phleo or pLXZ161 DNA and incubated on ice for 30 min. An aliquot of SPTC (15 μl) is added to each tube and the reaction is incubated at room temperature for 15 minutes. An additional aliquot (500 μl) is added with gentle mixing, and the reaction is incubated for an additional 15 minutes at room temperature. The reaction is next resuspended in 25 ml of molten regeneration medium (Potato Dextrose Agar from Sigma with 0.8 M sucrose, maintained at 50° C.), and poured onto a 150 mm petri plate containing 25 ml of solidified regeneration medium plus phleomycin (60-200 μg/ml). Transformants are typically visible after 2-5 days of incubation at 26-30° C.

[0314] To assess impact of overexpression of TPK2 on secondary metabolism, spore preps from twenty transformants from both the pTPK2phleo and pLXZ161 transformations are made. Each of these preps (1×10⁷ conidia/ml) is used to inoculate Erlenmeyer flasks (250 ml) containing 50 ml of production medium, composed of 10% glucose, 2% corn steep liquor, 5% tomato paste, and 2% beer yeast (Novak et al., 1997 Biotechnology Letters 19: 947-948). The flasks are incubated at 26° C. on a rotary shaker (250 rpm) for 7 days.

[0315] 1 mL samples of fermentation broth are obtained every twenty-four hours over the twelve day growth of the transformant cultures in production media. After twelve days, the cell mass for each culture is separated from the broth by filtration, lyophilized and weighed. Lovastatin concentration in the whole broth (broth plus cell mass) from each of the time points is determined for every sample by measuring the amount of lovastatin in a fixed volume of fermentation broth by HPLC analysis, using lovastatin (open form) dissolved in 0.2M Tris buffer, pH 8/ethanol (2:1, v/v) to different concentrations to determine a standard curve. For each whole broth sample, the pH is adjusted to 7.7 and an equal volume of methanol is added. HPLC separation conditions are adapted from Friedrich et al. (J. Chromatogr. A. 704: 363-367 (1995)) and lovastatin is detected using a diode array spectrophotometer monitoring 237 nm. Lovastatin is separated from the other broth components on a spherisorb ODS-2 HPLC column using the following mobile phase: potassium phosphate buffer (pH 7.7)-acetonitrile (65:35, v/v). Yield of lovastatin is expressed both as the amount of lovastatin per unit volume of broth after twelve days and also the amount of lovastatin per gram of dry cell weight of biomass at seven days. Productivity is determined by measuring the amount of lovastatin per unit volume of broth per gram of dry cell weight at each 24 hour time point of the fermentation and by expressing this concentration as a function of fermentation time. Transformants with increased productivity will show a higher concentration of lovastatin at earlier time points than seen for vector controls, although they need not show increased yield at seven days to exhibit increased productivity.

[0316] To determine the impact of TPK2 overexpression on sulochrin production the same whole broth/methanol extracts described above are assessed for concentration of sulochrin at the twelve day time points, also using HPLC analysis. Conditions for determining sulochrin concentrations by HPLC were developed by Vinci et al. (J. Ind. Microbiol. 8: 113-120 (1991)) and involve separation on a C-8 HPLC column using a mobile phase of 0.1% H₃PO₄-acetonitrile (40:60, v/v) and detecting at 235 nm.

### Example 2

[0317] Growth of a fungus that produces secondary metabolites can be limited, in part, by the toxic effects of the secondary metabolites themselves. In the absence of resistance mechanisms to protect fungi from toxic effects of these metabolites, decreased yields of the metabolite can be observed. For example, Alexander et al. (Mol. Gen. Genet. 261: 977-84 (1999)) have shown that the trichothecene efflux pump of Fusarium sporotrichiodes, encoded by the gene TRI12, is required both for high level production of, and resistance to the toxic effects of, trichothecenes produced by this fungus. Thus, modifications that increase the resistance of a fungus to a toxic secondary metabolite that it produces can increase the saturation density and extend the metabolically active lifetime of the producing fungus. In a bioreactor, such attributes will have the beneficial effect of increasing yield and productivity of a metabolite. Regulators of secondary metabolite production whose expression can be modulated to increase resistance of a fungus to toxic metabolites that it produces can include, without limitation, transporters that promote efflux of the metabolite from cells, enzymes that alter the chemical structure of the metabolite within cells to render it non-toxic, target(s) of the metabolite that mediate its toxicity, and gene products that alter cellular processes to counteract the toxic effects of a metabolite. Additional benefits of increasing efflux of secondary metabolites include increasing the amount of metabolite available for purification from the fermentation broth and mitigation of feedback inhibition of secondary metabolism that may be mediated by the metabolite itself. Indeed, feedback inhibition of a biosynthetic pathway by a product of that pathway is well documented in many microorganisms, and this inhibition can act at the transcriptional, translational, and post-translational levels. Several well-documented examples in yeast include the transcriptional repression of lysine biosynthetic genes by lysine (Feller et al., Eur. J. Biochem. 261: 163-70 (1999)), the decreased stability of both the mRNA encoding the uracil permease Fur4p and the permease itself in the presence of uracil (Seron et al., J. Bacteriol. 181: 1793-800 (1999)), and the inhibition of alpha-isopropyl malate synthase, a key step in leucine biosynthesis, by the presence of leucine (Beltzer et al., J. Biol. Chem. 263: 368-74 (1988)).

[0318] Transporters that could mediate resistance to secondary metabolites include members of the major facilitator superfamily (MFS) and the ATP binding cassette (ABC) transporters. For example, overexpression of the class I MFS-type transporter Flr1p in S. cerevisiae has been shown to confer resistance to a variety of toxic compounds such as cycloheximide, fluconazole, 4-nitroquinolone oxide, and cerulenin (Alarco et al., J. Biol. Chem. 272: 19304-13 (1997); Oskouian and Saba, Mol. Gen. Genet. 261: 346-53 (1999)). MFS transporters have been functionally grouped into 23 families in yeast, several of which contain members known or suspected to mediate resistance to toxic compounds by promoting their efflux from the cell (reviewed by Nelissen et al. in FEMS Microbiol. Rev. 21: 113-34 (1997)). Likewise, ABC transporters encoded by genes including PDR5 from S. cerevisiae (Boyum and Guidotti, Biochem. Biophys. Res. Commun. 230: 22-6 (1997)), PMR1 from Penicillium digitatum (Nakuane et al., Appl. Environ. Microbiol. 64: 3983-8 (1998)) and MDR1 from Candida albicans (Sanglard et al., Antimicrob. Agents Chemother. 39: 2378-86 (1995)), amongst others, have been shown to confer resistance to a variety of toxic compounds when their expression is increased. A complete cataloging of ABC transporters in yeast, as well as predicted function based on sequence similarities to transporters of known function, is described in (Decottignies and Goffeau, Nat. Genet. 15: 137-45 (1997)).

[0319] Transcription factors that regulate the expression of efflux pumps could also be used to increase efflux of a drug from a fungal cell to increase yields of a metabolite and decrease toxicity of the secondary metabolite in a fermentation. Such transcription factors include, but are not limited to, genes such as YAP1, PDR1, and PDR3 from S. cerevisiae and their homologs. Overexpression of each of these genes has been shown to upregulate expression of transporters and cause increased resistance of S. cerevisiae to toxic compounds (for examples, see Reid et al., J. Biol. Chem. 272: 12091-9 (1997); Katzmann et al., Mol. Cell. Biol. 14: 4653-61 (1994); Wendler et al., J. Biol. Chem. 272: 27091-8 (1997)).

[0320] Resistance to the toxic effects of secondary metabolites mediated through modulating expression of target genes will vary with metabolite. For example, amatoxins kill cells by inhibiting the function of the major cellular RNA polymerase, RNA polymerase II, in eucaryotic cells. Mutant forms of RNA polymerase II resistant to the effects of alpha-amanitin have been members of the MFS class of transporters. As described above, some MFS transporters are known to confer resistance to toxic compounds. PUMP1 and PUMP2 were tested for their ability to confer resistance to otherwise toxic levels of lovastatin when expressed in the fungus S. cerevisiae.

[0321] Aspergillus terreus (MF22; ATCC20542) was grown for 45 hours in Production Media at 25° C. (Production Media contains Cerelose, 4.5% (w/v) Peptonized Milk, 2.5% (w/v) Autolyzed yeast, 0.25% (w/v) Polyglycol P2000, 0.25% (w/v) pH to 7.0). Mycelia were harvested in a 50 cc syringe plugged with sterile cotton wool using a vacuum apparatus, washed once with sterile H2O, and snap frozen in liquid nitrogen. Mycelia were then ground to a powder under liquid nitrogen in a mortar and pestle, and homogenized in RLC buffer (Qiagen RNeasy Kit; Qiagen Inc., 28159 Avenue Stanford, Valencia Calif. 93155) using a GLH rotor-stator homogenizer (Omni International, 6530 Commerce Ct., Suite 100, Warrenton, Va. 20817.) Total RNA was purified using a RNeasy Maxi column according to the instructions of the manufacturer.

[0322] The polyA+ fraction of the A. terreus total RNA was isolated using Oligotex beads (Qiagen Inc.). Purified polyA+ RNA (5 μg) was used to generate complementary DNA (cDNA) using Superscript Reverse Transcriptase (Gibco BRL, 9800 Medical Center Drive, PO Box 6482, Rockville, Md. 20849) according to the instructions of the manufacturer. The cDNA was then used to isolate and clone PUMP1 and PUMP2 gene sequences using the polymerase chain reaction (PCR) and Gateway (Life Technologies) Cloning Technology (U.S. Pat. No. 5,888,732). Oligonucleotide sequences used for PCR were 5′-ACAAAAAAGCAGGCTCCACAATGACATCCCACCACGGTGA-3′ (SEQ ID NO: 7) and 5′-ACAAGAAAGCTGGGTTCATTCGCTCCGTCCTTTCT-3′ (SEQ ID NO: 8) for PUMP1. Oligonucleotide sequences used for PUMP2 PCR were 5′-ACAAAAAAGCAGGCTCCACAATGGGCCGCGGTGACACTGA-3′ (SEQ ID NO: 9) and 5′-ACAAGAAAGCTGGGTCTATTGGGTAGGCAGGTTGA-3′ (SEQ ID NO: 10). The resultant plasmids, MB1333 and MB1334, were designed to express PUMP1 and PUMP2, respectively, under control of the S. cerevisiae TEF1 promoter. The plasmids carry a functional URA3 gene to allow for selection of the plasmid on media lacking uracil in a ura3 mutant strain. These plasmids also contained a 2-micron origin for high-copy replication in yeast. Control plasmids were as follows: MB969, the parent vector for MB1333 and MB1334, that does not contain a heterologous gene and is not expected to confer resistance to a yeast strain; MB1344, constructed and described in Donald et al., Appl. Environ. Microbiol. 63: 3341-4 (1997) as pRH127-3, that expresses a soluble form of HMG CoA reductase under control of the yeast GPD1 promoter and is known to confer resistance to increased levels of lovastatin (Donald et al., Appl. Environ. Microbiol. 63: 3341-4 (1997)).

[0323] MB1333, MB1334, MB969 and MB1344 were transformed into the yeast strain 22409 (Research Genetics, USA) using standard transformation methods for S. cerevisiae (Biotechniques, 1992, 13(1): 18). Strain 22409 is derived from the S288c strain background of S. cerevisiae, and its complete genotype is as follows: MATa/α, his3Δ1/his3Δ1, leu2Δ0/leu2Δ0, ura3Δ0/ura3Δ0, LYS2/lys2Δ0, MET15/met15Δ0::G418/PDR5. Transformants were grown overnight at 30° C. in synthetic complete media lacking uracil (SC-U) to maintain selection for the plasmid. Cultures were diluted 1:10 in sterile water, and 5 μl of each strain was spotted to SC-URA agar containing different concentrations of lovastatin as shown in FIG. 1. Strikingly, the strain harboring MB1333, and thus expressing PUMP1, shows resistance to lovastatin equivalent to the positive control strain in which the soluble fragment of HMG CoA reductase is overexpressed (strain carrying MB1344). These strains show no obvious growth inhibition even at the highest concentrations of lovastatin tested (150 μg/ml). In contrast, the vector-only control and the strain expressing PUMP2 show growth inhibition at the lowest concentration of lovastatin tested (50 μg/mL). Thus, these data indicate that PUMP1 is an excellent candidate for use in engineering lovastatin producing strains to enhance resistance to lovastatin and to promote efflux of this secondary metabolite.

### Example 3

[0324] Methods for improving the production of secondary metabolites can involve the construction of strains with desired characteristics for growth or recovery of secondary metabolites. Optimal strain characteristics likely will vary depending upon the fungus being utilized, the particular secondary metabolite being produced, and the specifications of an individual fermentation apparatus. Two traits that might be advantageous for maximal production of secondary metabolites are strains that can be lysed under specific conditions and strains that have morphological characteristics such as increased surface area of active growth and decreased hyphal length. Described below are examples of how both of these traits can be affected by modulating the activity of small GTP-binding proteins (G-proteins).

[0325] Fungi must respond to adverse external signals such as osmotic stress. Media for production of secondary metabolites often are hypo-osmotic, whereas fungi that exist on desiccated surfaces must respond to hyper-osmotic stress. One response to hyper-osmotic conditions is to increase the intracellular concentration of osmolytes such as glycerol. During hypo-osmotic stress the integrity of a fungal cell can be maintained both by decreasing intracellular osmolyte concentrations as well as by cell wall modifications. In Saccharomyces cerevisiae the PKC1-SLT2 signaling pathway is required for growth in conditions of low osmolarity (reviewed in Heinisch et al., Mol. Microbiol. 32: 671-680 (1999)). PKC1, which encodes yeast protein kinase C, is activated by components such as the small GTP-binding protein Rho1. Pkc1 then transduces this signal to a MAP kinase signaling cascade that includes the MEK kinase Bck1, the functionally redundant MEKs Mkk1 and Mkk2, and the MAP kinase Slt2. Mutations in genes encoding these signaling components result in varying degrees of cell lysis on media of low osmolarity. Genetic screens have identified many other proteins that function either upstream of PKC1-SLT2 signaling or regulate specific pathway components. These factors include Ppz1, Ppz2, Pph21, Pph22, Ptp2, Ptp3, Isr1, Rom1, Rom2, Mid2, Slg1, Wsc2, Wsc3, Wsc4, Stt3, Stt4, and Vps45; many of these components have homologs in other fungi. In addition, transcription factors, such as Rlm1, Swi4, and Swi6, that can function downstream of PKC1-SLT2 signaling have been identified, and it has been demonstrated that some of these factors are required for the proper expression of genes involved in cell wall biosynthesis. Thus, many components that can modulate the structural integrity of yeast cells have been identified. It is possible that manipulation of these factors could be performed, such that conditional expression of variants of these genes (or the homologs from filamentous fungi) would result in the lysis of fungi and maximal recovery of secondary metabolites.

[0326] Conditional lysis of fungi at the conclusion of a fermentor run would be a powerful method for promoting increased recovery of secondary metabolite. Preferably, conditional lysis would require a simple manipulation such as a change in a standard growth parameter (e.g. temperature, dissolved oxygen) or addition of an inexpensive solute. Examples of small molecules that may cause cell lysis include the protein kinase C inhibitor staurosporine, caffeine, dyes that bind the cell wall polymer chitin (e.g. calcofluor white, Congo red), inhibitors of glucan synthase (e.g. candins), and inhibitors of chitin synthase. The cost of using these molecules in a large-scale fermentor likely would be prohibitive. Similarly, addition of enzymes such as glucanases or chitinases would likely be an effective, but costly, method for inducing lysis. An alternative means to induce lysis would be the conditional expression of a dominant negative mutation in a gene encoding a component required for cell wall integrity. Since many components of the PKC1-SLT2 signaling pathway are widely conserved, it is possible that the conditional expression of a dominant inhibitory form of a member of this pathway would facilitate lysis in a variety of fungi, including those fungi that produce secondary metabolites such as lovastatin and cyclosporin A.

[0327] The G-protein Rho1 functions to regulate cell wall integrity by at least two independent mechanisms; Rho1 activates Pkc1 signaling as well as 1,3-beta-glucan synthase activity (Nonaka et al., EMBO J. 14: 5931-5938 (1995); Drgonova et al., Science 272: 277-279 (1996); Qadota et al., Science 272: 279-281 (1996)). In addition, dominant inhibitory forms of Rho1 have been identified. Expression of a rho1G22S D125N mutant form in a wild-type Saccharomyces cerevisiae strain results in cell lysis. Therefore, the conditional expression of dominant inhibitory forms of Rho1 under the control of a heat-shock inducible promoter might be an effective method for causing cell lysis in production fungi.

[0328] RHO1 coding sequence for construction of dominant mutations can be isolated from Saccharomyces cerevisiae genomic DNA. Primers 5′-cgcGGATCCCGACATATTCGAGGTTGACT-3′ (SEQ ID NO: 11) and 5′-cccAAGCTTGCTAGAAATATGAACCTTCC-3′ (SEQ ID NO: 12) are used to amplify RHO1 coding sequence with 1 kilobase of upstream regulatory sequence and 500 basepairs of downstream regulatory sequence. BamHI and HindIII restriction sites are added to the oligonucleotides to facilitate cloning into the pRS416 centromere-based yeast vector. The Quik Change Site-Directed Mutagenesis Kit (Stratagene, La Jolla Calif.) is used to first create a mutation that encodes the G22S substitution; next, the pRS416rho1G22S plasmid is used as a template to introduce a mutation that encodes the D125N substitution. Primer pair 5′-gtgcctgtAgtaagacatgt-3′/5′-acatgtcttacTacaggcac-3′ is used to anneal to the pRS416RHO1 template for pRS416rho1G22S allele construction. Primer pair 5′-gtaaagtgAatttgagaaac-3′/5′-gtttctcaaatTcactttac-3′ is used to anneal to the pRS416rho1G22S template for pRS416rho1G22S D125N allele construction. pRS416rho1G22S D125N and control plasmids (pRS416RHO1 and pRS416) are then used to transform a wild-type ura3 auxotrophic strain. Transformants are selected and grown at 25° C. in synthetic liquid growth medium lacking uracil and containing the osmolyte sorbitol (1M). Cultures are then transferred to growth in synthetic liquid growth medium lacking uracil without sorbitol, and cells are visually inspected following growth for various periods of time. Expression of the rho1G22S D125N dominant allele causes cell lysis after growth for approximately 120 minutes.

[0329] Conditional promoters can be used to express RHO1 dominant mutations in filamentous fungi. The Aspergillus niger tpsB gene is expressed at low levels during growth at ambient temperatures, whereas expression is strongly enhanced upon heat-shock at 40° C.; tpsB regulatory sequence contains multiple copies of the CCCCT stress responsive element (Wolschek et al., J. Biol. Chem. 272: 2729-2735 (1997)). Primers 5′catgGGGCCCTCTCTCCACCGGCACTAAGATAGC-3′ (SEQ ID NO: 13) and 5′cgcGGATCCagCATTGGAAAAGGAGGGGGGGGAAG-3′ (SEQ ID NO: 14) are used to amplify 490 basepairs of tpsB upstream regulatory sequence from A. niger genomic DNA. This PCR product contains the tpsB start codon followed by a BamHI cloning site. The tpsB upstream regulatory sequence can be cloned as an ApaI/BamHI fragment into the filamentous fungal vector pLXZ116 (see Example 1). The tpsB promoter is cloned into a multiple cloning site that also contains terminator sequence of the A. nidulans trpC gene. Primers 5′cgcGGATCCaTCACAACAAGTTGGTAACAGTATC-3′ (SEQ ID NO: 15) and 5′-ggACTAGTTAACAAGACACACTTCTTCTTCTT-3′ (SEQ ID NO: 16) are used to amplify rho1G22S D125N coding sequence, and the product is cloned into the BamHI/SpeI sites of the tpsB containing filamentous fungal vector. This vector can be used to conditionally express (at 40° C.) a dominant negative form of Rho1 that can cause cell lysis.

[0330] The filamentous fungal vector containing the tpsB promoter (no RHO1 insert) and a vector containing rho1G22S D125N are used to transform Aspergillus nidulans, Penicillium chrysogenum, and Aspergillus terreus. To assess the impact of conditional expression of a RHO1 dominant negative mutation on cell wall integrity of filamentous fungi, mycelia or spore preps are made from 10 independent transformants, and mycelia or spores are used to inoculate both liquid shake flask cultures and plates containing minimal or rich medium. After growth for 1-2 days the strains are transferred to both 37° C. and 40° C. Strains are examined for morphological defects over the next 24 hours of incubation; potential morphological defects include abnormalities in polarized growth, hyphal wall integrity, and conidiophore development. The optimal time of heat-shock induction required for lysis will be determined. Furthermore, it will be determined whether any abnormalities can be suppressed by growth on medium containing osmotic stabilizers such as sorbitol (1.2 M), sucrose (1 M), or NaCl (1.5 M).

[0331] Transformants of Aspergillus terreus that display morphological abnormalities are used to assess whether conditional lysis of strains can be a tool for recovering larger quantities of lovastatin from fermentation broths. Five independent RHO1-containing transformants that display lysis defects will be processed as the A. terreus transformants described in earlier examples. Cultures from each transformant and control strains will be grown for either 8, 9, 10, 11, or 12 days, and cultures will then be incubated at the optimal temperature and for the optimal time required for cell lysis. Following heat shock the cell mass from each culture is separated from the broth by filtration, and the cell mass is lyophilized and weighed. Lovastatin concentration in the broth is calculated as described in earlier examples.

[0332] Morphological characteristics such as decreased hyphal length might be advantageous during production of secondary metabolites. For example, strains with shorter filament lengths should display decreased entanglement, floc formation, and shear stress. Such strains would be less susceptible to shear stress damage, these strains might reduce viscosity and facilitate mass transfer, and short filament strains might save energy costs required to power impellers. Increasing the amount of hyphal branching should result in an overall decrease in filament length. The following example describes how expression of a dominant inactive form of the Saccharomyces cerevisiae Rsr1 protein (also known as Bud1) results in increased lateral branch formation.

[0333] The yeast Rsr1 protein is required for proper bud site selection; strains lacking Rsr1 bud at random sites on the cell surface. Dominant negative mutations such as rsr1K16N have been identified, and expression of these mutant forms cause random bud site selection without causing obvious growth defects. Expression of rsr1K16N in filamentous fungi may increase branching, decrease filament length, and not have deleterious effects on the growth of the organism.

[0334] RSR1 coding sequence for construction of dominant mutations can be isolated from Saccharomyces cerevisiae genomic DNA. Primers 5′-cgcGGATCCTATCTTCACTCAATATACTTCCTA-3′ (SEQ ID NO: 17) and 5′-cccAAGCTTCATCGTTGAAACTTGATAACGCAC-3′ (SEQ ID NO: 18) are used to amplify RHO1 coding sequence with 750 basepairs of upstream regulatory sequence and 500 basepairs of downstream regulatory sequence. BamHI and HindIII restriction sites are added to the oligonucleotides to facilitate cloning into the pRS416 centromere-based yeast vector. The Quik Change Site-Directed Mutagenesis Kit (Stratagene, La Jolla Calif.) is used to create dominant-negative RSR1 substitution mutation K16N. Primer pair 5′-tggtgtcggtaaTtcctgcttaac-3′/5′-gttaagcaggaAttaccgacacca-3′ is used to anneal to the pRS416RSR1 template for allele construction. The pRS416rsr1K16N and control pRS416 plasmids are then used to transform a haploid wild-type ura3 auxotrophic strain. Transformants are selected and grown at 30° C. in YPD liquid growth medium. Log phase cultures are fixed in 3.7% formaldehyde (vol:vol) and stained with the chitin-binding dye Calcofluor white, as described; previous sites of bud formation are marked with a chitin-rich structure called a bud scar. Fluorescent microscopy reveals that cells containing the control plasmid display clustering of bud scars at one pole of the cells, the well-characterized haploid pattern of bud site selection. Cells expressing rsr1K16N display-a random pattern of bud site selection; bud scars are scattered across the surface of haploid cells. Cells expressing rsr1K16N do not display other obvious growth or morphological defects.

[0335] The Aspergillus nidulans PGK promoter can be used to express RSR1 dominant mutations in filamentous fungi. A filamentous fungal vector containing a multiple cloning site that is flanked by the PGK promoter and terminator sequence of the A. nidulans trpC gene is used. Primers 5′-cgcGGATCCGACTAATGAGAGACTATAAATTAG-3′ (SEQ ID NO: 19) and 5′-ccgCTCGAGCTATAGAATAGTGCAAGTGGAAGC-3′ (SEQ ID NO: 20) are used to amplify rsr1K16N coding sequence, and the product is cloned into the BamHI/XhoI sites of the filamentous fungal vector. This vector can be used to express a dominant negative form of Rsr1 that will affect the process of selecting sites for polarized growth.

[0336] The filamentous fungal vector containing rsr1K16N and control vector are used to transform Aspergillus nidulans, Penicillium chrysogenum, and Aspergillus terreus. To assess the impact of expression of RSR1 dominant negative mutations on lateral branch formation and filament length, mycelia and spore preps are made from 10 independent PCR-positive transformants, and mycelia and spores are used to inoculate both liquid shake flask cultures and plates containing minimal or rich medium. Strains are examined at various timepoints over a 48 hour period for morphological alterations, including altered patterns of germ tube emergence, increased lateral branching, decreased filament length, alterations in hyphal width, and changes in chitin staining pattern. Strains displaying desirable morphological changes are then tested in shake flask conditions to determine whether levels of penicillin (A. nidulans, P. chrysogenum) or lovastatin (A. terreus) production have changed significantly.

[0337] Aspergillus terreus and Penicillium chrysogenum transformants that display morphological characteristics such as decreased filament length and produce expected or greater levels of lovastatin and penicillin, respectively, are used to assess whether morphological changes can impact upon bioreactor challenges such as shear stress damage, mass transfer, and energy costs. Five independent PCR-positive RSR1-containing transformants that display morphological alterations are grown in a small-scale bioreactor, and examined for improved fermentation characteristics and/or production of secondary metabolite.

What is claimed is:

1. A method for improving production of a secondary metabolite by a fungus by increasing the yield of the secondary metabolite in the fungus, the method comprising modulating the expression of a gene involved in regulation of secondary metabolite production in a manner that improves the yield of the secondary metabolite, provided however, that when the secondary metabolite is isopenicillin N, then the modulation is not mediated by transcription factor CPCR1; when the secondary metabolite is sterigmatocystin, then the modulation is not through AflR, FadA, or FluG; when the secondary metabolite is aflatoxin, then the modulation is not through AflR; when the secondary metabolite is penicillin and the fungus is Aspergillus nidulans, then the modulation is not through mutations that result in expression of truncated forms of PacC or constitutively active forms of FadA; and when the gene involved in regulation of secondary metabolite production is from Saccharomyces cerevisiae, then the modulation is not through decreased activity or expression of Hog1, Bem2, Rim15, Sfl1, Ira1, Ssd1, Srb11, Swi4, Tpk3 or though increased activity or expression of Afl1, Dhh1, Inv7, Inv8, Ste21, Pet9, Mep2, Inv1, Inv5, Inv6, Inv9, Inv10, Inv 11, Inv12, Inv13, Inv14, Inv15, Cdc25, Mcm1, Mga1, Phd2, Pho23, Ptc1, Rim1, Stp22, Tpk2 or Ypr1.

2. The method according to claim 1, wherein the modulation is overexpression of the gene.

3. The method according to claim 1, wherein the modulation is conditional expression of the gene.

4. The method according to claim 1, wherein the modulation is expression of a dominant mutation of the gene.

5. The method according to claim 4, wherein the dominant mutation is a dominant negative mutation.

6. The method according to claim 4, wherein the dominant mutation is a dominant positive mutation.

7. The method according to claim 4, wherein the dominant mutation is a dominant neomorphic mutation.

8. The method according to claim 1, wherein the modulation is mediated by a peptide modulator of gene expression.

9. The method according to claim 8, wherein the peptide modulator is an activator of gene expression.

10. The method according to claim 8, wherein the peptide modulator is an inhibitor of gene expression.

11. The method according to claim 1, wherein the modulation is mediated by a small molecule modulator of gene expression.

12. The method according to claim 11, wherein the small molecule modulator is an activator of gene expression.

13. The method according to claim 11, wherein the small molecule modulator is an inhibitor of gene expression.

14. The method according to any of claims 1-13, further comprising the step of purifying the secondary metabolite from a culture of the fungus.

15. A method for improving production of a secondary metabolite by a fungus by increasing productivity of the secondary metabolite in the fungus, the method comprising modulating the expression of a gene involved in regulation of secondary metabolite production in a manner that improves the productivity of the secondary metabolite, provided however, that when the secondary metabolite is isopenicillin N, then the modulation is not mediated by transcription factor CPCR1; when the secondary metabolite is sterigmatocystin, then the modulation is not through AflR, FadA, or FluG; when the secondary metabolite is aflatoxin, then the modulation is not through AflR; when the secondary metabolite is penicillin and the fungus is Aspergillus nidulans, then the modulation is not through mutations that result in expression of truncated forms of PacC or constitutively active forms of FadA; and when the gene involved in regulation of secondary metabolite production is from Saccharomyces cerevisiae, then the modulation is not through decreased activity or expression of Hog1, Bem2, Rim15, Sfl1, Ira1, Ssd1, Srb11, Swi4, Tpk3 or though increased activity or expression of Afl1, Dhh1, Inv7, Inv8, Ste21, Pet9, Mep2, Inv1, Inv5, Inv6, Inv9, Inv10, Inv11, Inv12, Inv13, Inv14, Inv15, Cdc25, Mcm1, Mga1, Phd2, Pho23, Ptc1, Rim1, Stp22, Tpk2 or Ypr1.

16. The method according to claim 15, wherein the modulation is overexpression of the gene.

17. The method according to claim 18, wherein the modulation is conditional expression of the gene.

18. The method according to claim 15, wherein the modulation is expression of a dominant mutation of the gene.

19. The method according to claim 18, wherein the dominant mutation is a dominant negative mutation.

20. The method according to claim 18, wherein the dominant mutation is a dominant neomorphic mutation.

21. The method according to claim 18, wherein the dominant mutation is a dominant positive mutation.

22. The method according to claim 15, wherein the modulation is mediated by a peptide modulator of gene expression.

23. The method according to claim 22, wherein the peptide modulator is an activator of gene expression.

24. The method according to claim 22, wherein the peptide modulator is an inhibitor of gene expression.

25. The method according to claim 15, wherein the modulation is mediated by a small molecule modulator of gene expression.

26. The method according to claim 25, wherein the small molecule modulator is an activator of gene expression.

27. The method according to claim 25, wherein the small molecule modulator is an inhibitor of gene expression.

28. The method according to any of claims 15-27, further comprising the step of purifying the secondary metabolite from a culture of the fungus.

29. A method for improving production of a secondary metabolite in a fungus by increasing efflux or excretion of the secondary metabolite, the method comprising modulating the expression of a gene involved in regulation of secondary metabolite production in a manner that increases efflux or excretion the secondary metabolite.

30. The method according to claim 29, wherein the modulation is overexpression of the gene.

31. The method according to claim 29, wherein the modulation is conditional expression of the gene.

32. The method according to claim 32, wherein the modulation is expression of a dominant mutation of the gene.

33. The method according to claim 32, wherein the dominant mutation is a dominant negative mutation.

34. The method according to claim 32, wherein the dominant mutation is a dominant neomorphic mutation.

35. The method according to claim 32, wherein the dominant mutation is a dominant positive mutation.

36. The method according to claim 29, wherein the modulation is mediated by a peptide modulator of gene expression.

37. The method according to claim 36, wherein the peptide modulator is an activator of gene expression.

38. The method according to claim 36, wherein the peptide modulator is an inhibitor of gene expression.

39. The method according to claim 29, wherein the modulation is mediated by a small molecule modulator of gene expression.

40. The method according to claim 39, wherein the small molecule modulator is an activator of gene expression.

41. The method according to claim 39, wherein the small molecule modulator is an inhibitor of gene expression.

42. The method according to any of claims 29-41, further comprising the step of purifying the secondary metabolite from a culture of the fungus.

43. A method for improving production of a secondary metabolite in a fungus by decreasing production of side products or competing secondary metabolites, the method comprising modulating the expression of a gene involved in regulation of secondary metabolite production in a manner that decreases production of side products or competing secondary metabolites.

44. The method according to claim 43, wherein the modulation is overexpression of the gene.

45. The method according to claim 43, wherein the modulation is conditional expression of the gene.

46. The method according to claim 43, wherein the modulation is expression of a dominant mutation of the gene.

47. The method according to claim 46, wherein the dominant mutation is a dominant negative mutation.

48. The method according to claim 46, wherein the dominant mutation is a dominant neomorphic mutation.

49. The method according to claim 46, wherein the dominant mutation is a dominant positive mutation.

50. The method according to claim 43, wherein the modulation is mediated by a peptide modulator of gene expression.

51. The method according to claim 50, wherein the peptide modulator is an activator of gene expression.

52. The method according to claim 50, wherein the peptide modulator is an inhibitor of gene expression.

53. The method according to claim 43, wherein the modulation is mediated by a small molecule modulator of gene expression.

54. The method according to claim 53, wherein the small molecule modulator is an activator of gene expression.

55. The method according to claim 53, wherein the small molecule modulator is an inhibitor of gene expression.

56. The method according to any of claims 43-55, further comprising the step of purifying the secondary metabolite from a culture of the fungus.

57. A method for improving production of a secondary metabolite in a fungus by altering the characteristics of the fungus in a manner that is beneficial to the production of the secondary metabolite, the method comprising modulating the expression of a gene involved in regulation of secondary metabolite production in a manner that alters the characteristics of the fungus.

58. The method according to claim 57, wherein the altered characteristic is transition from hyphal growth to yeast form.

59. The method according to claim 57, wherein the altered characteristic is an increase or decrease in flocculence.

60. The method according to claim 57, wherein the altered characteristic is increased or decreased adhesion to a surface.

61. The method according to any of claims 57-60, wherein the modulation is overexpression of the gene.

62. The method according to any of claims 57-60, wherein the modulation is conditional expression of the gene.

63. The method according to any of claims 57-60, wherein the modulation is expression of a dominant mutation of the gene.

64. The method according to claim 63, wherein the dominant mutation is a dominant negative mutation.

65. The method according to claim 63, wherein the dominant mutation is a dominant positive mutation.

66. The method according to claim 63, wherein the dominant mutation is a dominant neomorphic mutation.

67. The method according to any of claims 57-60, wherein the modulation is mediated by a peptide modulator of gene expression.

68. The method according to claim 67, wherein the peptide modulator is an activator of gene expression.

69. The method according to claim 68, wherein the peptide modulator is an inhibitor of gene expression.

70. The method according to any of claims 57-60, wherein the modulation is mediated by a small molecule modulator of gene expression.

71. The method according to claim 70, wherein the small molecule modulator is an activator of gene expression.

72. The method according to claim 70, wherein the small molecule modulator is an inhibitor of gene expression.

73. The method according to any of claims 57-72, further comprising the step of purifying the secondary metabolite from a culture of the fungus.

74. A method for improving production of a secondary metabolite in a fungus by causing conditional lysis of the fungus, the method comprising modulating the expression of a gene involved in regulation of secondary metabolite production in a manner that causes conditional lysis.

75. The method according to claim 74, wherein the modulation is overexpression of the gene.

76. The method according to claim 74, wherein the modulation is conditional expression of the gene.

77. The method according to claim 74, wherein the modulation is expression of a dominant mutation of the gene.

78. The method according to claim 77, wherein the dominant mutation is a dominant negative mutation.

79. The method according to claim 77, wherein the dominant mutation is a dominant positive mutation.

80. The method according to claim 77, wherein the dominant mutation is a dominant neomorphic mutation.

81. The method according to claim 74, wherein the modulation is mediated by a peptide modulator of gene expression.

82. The method according to claim 81, wherein the peptide modulator is an activator of gene expression.

83. The method according to claim 81, wherein the peptide modulator is an inhibitor of gene expression.

84. The method according to claim 74, wherein the modulation is mediated by a small molecule modulator of gene expression.

85. The method according to claim 84, wherein the small molecule modulator is an activator of gene expression.

86. The method according to claim 84, wherein the small molecule modulator is an inhibitor of gene expression.

87. The method according to any of claims 74-86, further comprising the step of purifying the secondary metabolite from a culture of the fungus.

88. A method for improving production of a secondary metabolite in a fungus by increasing the resistance of the fungus to the deleterious effects of exposure to a secondary metabolite, the method comprising modulating the expression of a gene involved in regulation of secondary metabolite production in a manner that increases resistance to the deleterious effects of exposure to a secondary metabolite.

89. The method according to claim 88, wherein the modulation is overexpression of the gene.

90. The method according to claim 88, wherein the modulation is conditional expression of the gene.

91. The method according to claim 88, wherein the modulation is expression of a dominant mutation of the gene.

92. The method according to claim 91, wherein the dominant mutation is a dominant negative mutation.

93. The method according to claim 91, wherein the dominant mutation is a dominant positive mutation.

94. The method according to claim 91, wherein the dominant mutation is a dominant neomorphic mutation.

95. The method according to claim 88, wherein the modulation is mediated by a peptide modulator of gene expression.

96. The method according to claim 95, wherein the peptide modulator is an activator of gene expression.

97. The method according to claim 95, wherein the peptide modulator is an inhibitor of gene expression.

98. The method according to claim 88, wherein the modulation is mediated by a small molecule modulator of gene expression.

99. The method according to claim 98, wherein the small molecule modulator is an activator of gene expression.

100. The method according to claim 98, wherein the small molecule modulator is an inhibitor of gene expression.

101. The method according to any of claims 88-100, further comprising the step of purifying the secondary metabolite from a culture of the fungus.

102. A genetically modified fungus, wherein the genetically modified fungus has an ability to produce secondary metabolites and the ability of the genetically modified fungus to produce secondary metabolites has been improved by any of the methods of claims 1-101.

103. A method for making a secondary metabolite, the method comprising culturing a genetically modified fungus according to claim 102 under conditions suitable for the production of secondary metabolites.

The application's sequence listing, which the Patent Office published only in electronic form, follows.

SEQUENCE LISTING (446 sequences)

SEQ ID NO: 1 - DNA, 26 bp, Aspergillus terreus
gaattcatggaattcgttgcagaaag

SEQ ID NO: 2 - DNA, 26 bp, Aspergillus terreus
ggatccttagaaatcttgaaagtatt

SEQ ID NO: 3 - DNA, 34 bp, Aspergillus nidulans
gcggccgcggcgcccggcccatgtcaacaagaat

SEQ ID NO: 4 - DNA, 25 bp, Aspergillus nidulans
ccgcggccgagtggagatgtggagt

SEQ ID NO: 5 - DNA, 30 bp, Aspergillus nidulans
catggggccccgtgatgtctacctgcccac

SEQ ID NO: 6 - DNA, 30 bp, Aspergillus nidulans
catgatcgattgtgggtagttaatggtatg

SEQ ID NO: 7 - DNA, 40 bp, Artificial Sequence
  Synthetic oligonucleotide sequence used for PUMP1 PCR.
acaaaaaagcaggctccacaatgacatcccaccacggtga

SEQ ID NO: 8 - DNA, 35 bp, Artificial Sequence
  Synthetic oligonucleotide sequence used for PUMP1 PCR.
acaagaaagctgggttcattcgctccgtcctttct

SEQ ID NO: 9 - DNA, 40 bp, Artificial Sequence
  Synthetic oligonucleotide sequence used for PUMP2 PCR
acaaaaaagcaggctccacaatgggccgcggtgacactga

SEQ ID NO: 10 - DNA, 35 bp, Artificial Sequence
  Synthetic oligonucleotide sequence for PUMP2 PCR.
acaagaaagctgggtctattgggtaggcaggttga

SEQ ID NO: 11 - DNA, 29 bp, Saccharomyces cerevisiae
cgcggatcccgacatattcgaggttgact

SEQ ID NO: 12 - DNA, 29 bp, Saccharomyces cerevisiae
cccaagcttgctagaaatatgaaccttcc

SEQ ID NO: 13 - DNA, 34 bp, Aspergillus niger
catggggccctctctccaccggcactaagatagc

SEQ ID NO: 14 - DNA, 35 bp, Aspergillus niger
cgcggatccagcattggaaaaggaggggggggaag

SEQ ID NO: 15 - DNA, 34 bp, Aspergillus nidulans
cgcggatccatcacaacaagttggtaacagtatc

SEQ ID NO: 16 - DNA, 32 bp, Aspergillus nidulans
ggactagttaacaagacacacttcttcttctt

SEQ ID NO: 17 - DNA, 33 bp, Saccharomyces cerevisiae
cgcggatcctatcttcactcaatatacttccta

SEQ ID NO: 18 - DNA, 33 bp, Saccharomyces cerevisiae
cccaagcttcatcgttgaaacttgataacgcac

SEQ ID NO: 19 - DNA, 33 bp, Aspergillus nidulans
cgcggatccgactaatgagagactataaattag

SEQ ID NO: 20 - DNA, 33 bp, Aspergillus nidulans
ccgctcgagctatagaatagtgcaagtggaagc

SEQ ID NO: 21 - DNA, 1629 bp, Aspergillus terreus
atgacatcccaccacggtgaaacagagaagccacagagcaacacggctcaaatgcagataaatcatgtcactggcctcaggctaggcctggttgtggtttcagtcactctggtggcgtttctgatgctcttggatatgtccatcattgtcacggcgattcctcacattaccgcccagtttcattccctgggcgatgtcggatggtacggaagtgcgtatcttctatcaagctgtgccctccaacccttggcaggcaaactatacactctgttgaccctgaaatacaccttcctcgcttttctcgggttgtttgagattggatcggttctttgcggcactgctcgttcgtcaaccatgttgattgtagggcgagcagtggccggaatgggagggtcggggctcaccaatggcgcaatcaccattctgtcggcggcagctccaaagcaacagcaaccgctcttgattgggatcatgatgggcctaagccaaatcgccattgtatgtggaccgttgcttgggggtgctttcacgcagcacgcaagttggcggtggtgtttttacatcaaccttcccattggggcgtttgccacatttctccttctcgtcatccagatccccaacagattgccatccacgtcggattcaaccacagacggcacaaaccccaagagaagaggggctcgggacgtcttgacccaactggatttccttggattcgtgctcttcgccggttttgcgatcatgatatctcttgctttggagtggggtgggtctgattatgcgtggaatagttccgtgatcatcggcttgttctgtgcggcgggcgtgtcgctggtgctgttcggatgctgggaacggcatgtcggcggtgcagtggccatgattcccatttccgtggccagtcgtcgccaagtctggtgctcctgcttcttcctcggctttttttccggggccctacttattttctcctactacctgcctatctacttccaggcggtcaagaatgtttctcccaccatgagtggagtgtatatgctgccgggcattggtggacagatcgtcatggcgattgtgacgggtgcaatcatcggtaaaacaggctattacgttccgtgggcgctcgcaagcgggatccttgtgtccatatccgccggactggtatcgaccttccagccggaaacctcgattgcagcatgggtcatgtatcagttcctgggaggcgtgggccgaggatgcggaatgcaaacccctgtcgtcgccattcaaaatgcgctgcctccacaaacgagccccatcggcatttcgctagccatgttcggccagacattcggtggctcgctttttctcaccctgaccgaattggtttttagcaatggtttggactctggtctgcgccaatatgcgccaaccctcaatgcacaggaggtaacagccgcaggggccaccggcttccgccaagtggtccccgctcctctcatctctcgggtcctcttagcatacagtaaaggcgtggaccatgcattctacgttgcggtcggtgcgtctggagctaccttcatcttcgcctggggtatgggccggcttgcctggagaggctggcggatgcaggagaaaggacggagcgaatga

SEQ ID NO: 22 - protein, 542 aa, Aspergillus terreus
MTSHHGETEKPQSNTAQMQINHVTGLRLGLVVVSVTLVAFLMLLDMSIIVTAIPHITAQFHSLGDVGWYGSAYLLSSCALQPLAGKLYTLLTLKYTFLAFLGLFEIGSVLCGTARSSTMLIVGRAVAGMGGSGLTNGAITILSAAAPKQQQPLLIGIMMGLSQIAIVCGPLLGGAFTQHASWRWCFYINLPIGAFATFLLLVIQIPNRLPSTSDSTTDGTNPKRRGARDVLTQLDFLGFVLFAGFAIMISLALEWGGSDYAWNSSVIIGLFCAAGVSLVLFGCWERHVGGAVAMIPISVASRRQVWCSCFFLGFFSGALLIFSYYLPIYFQAVKNVSPTMSGVYMLPGIGGQIVMAIVTGAIIGKTGYYVPWALASGILVSISAGLVSTFQPETSIAAWVMYQFLGGVGRGCGMQTPVVAIQNALPPQTSPIGISLAMFGQTFGGSLFLTLTELVFSNGLDSGLRQYAPTLNAQEVTAAGATGFRQVVPAPLISRVLLAYSKGVDHAFYVAVGASGATFIFAWGMGRLAWRGWRMQEKGRSE

SEQ ID NO: 23 - DNA, 1464 bp, Aspergillus terreus
atgggccgcggtgacactgagtccccgaacccagcgacgacctcggaaggtagcggacaaaacgagccagagaaaaagggccgtgatattccattatggagaaaatgtgtcattacgtttgttgttagttggatgactctagtcgttactttctccagtacttgtcttcttcctgccgcccctgaaatcgcgaatgaatttgatatgactgtcgagactatcaatatctccaatgctggtgtcttggttgccatgggatattcatccctcatatggggtcccatgaacaagttagtcggcaggcggacatcatacaatctggccatttcaatgctttgtgcgtgctccgctggaacggcagcggcgataaacgagaaaatgttcatagcgttcagagtattgagcggcttaaccggaacctcgttcatggtctcaggccaaactgttcttgcagatatctttgagcctgtttaccgtgggacggccgtaggtttcttcatggccgggactctttctggccctgcaatagcctgcgtgggaggggtcatcgtcactttcacgagttggcgtgttatcttctggcttcaactaggtatgagcggactggggctcgtgctttccctgctatttttcccgaaaatcgaaggaacttctgagaaggtctcaacggcgtttaaaccgaccacacttgtttcaatcatatcgaaattctccccaacggatgtgctcaagcagtgggtgtatccaaatgtctttcttgccgtaagtgcctgggagatatgccctctgcatctactggaaacgaaatgctcatgccgcaaacaaaaggacttatgctgtggcctcctggcgattacgcaatattcgatcctgacttcagctcgtgctatattcaactcacggtttcatttaacgactgccctagtatcgggtctcttctacctcgctccaggtgccgggttcctgatagggagtctcgtcggcggtaaactttcggatcgcaccgttcggagatacatagtaaagcgcggattccgtctccctcaggatcgactccacagcgggctcatcacattgtttgccgtgctgcctgcgggaacgctcatttacgggtggacactccaagaggataagggtgggatggtagtgcccataatcgcggcgttcttcgcgggctgggggctcatgggcagttttaactgcctgaacacttacgtggctgtagaagccttgccacggaaccggtctgcagtcattgcaggaaagtatatgattcaatactccttttctgcagggagtagtgcgctcgttgtgcccgtcatagacgccctcggagttggatggacgttcacgctatgtgtggttgcttcgactatagctggattgatcacggcggccatcgcacggtgggggataaatatgcaaaggtgggcagaaagggctttcaacctgcctacccaatag

SEQ ID NO: 24 - protein, 487 aa, Aspergillus terreus
MGRGDTESPNPATTSEGSGQNEPEKKGRDIPLWRKCVITFVVSWMTLVVTFSSTCLLPAAPEIANEFDMTVETINISNAGVLVAMGYSSLIWGPMNKLVGRRTSYNLAISMLCACSAGTAAAINEKMFIAFRVLSGLTGTSFMVSGQTVLADIFEPVYRGTAVGFFMAGTLSGPAIACVGGVIVTFTSWRVIFWLQLGMSGLGLVLSLLFFPKIEGTSEKVSTAFKPTTLVSIISKFSPTDVLKQWVYPNVFLAVSAWEICPLHLLETKCSCRKQKDLCCGLLAITQYSILTSARAIFNSRFHLTTALVSGLFYLAPGAGFLIGSLVGGKLSDRTVRRYIVKRGFRLPQDRLHSGLITLFAVLPAGTLIYGWTLQEDKGGMVVPIIAAFFAGWGLMGSFNCLNTYVAVEALPRNRSAVIAGKYMIQYSFSAGSSALVVPVIDALGVGWTFTLCVVASTIAGLITAAIARWGINMQRWAERAFNLPTQ

SEQ ID NO: 25 - DNA, 2229 bp, Aspergillus terreus
atggagagtgcagagctgtcgtcgaagcggcaggcatttcctgcatgtgatgagtgccggatccgtaaggtccgatgcagcaaggagggtccaaagtgctcccattgcctccgatataacctaccctgtgaattctccaacaaagtggcgcgcgacgtcgagaagctcgggagtcgggttggagatatcgaacatgccctccaacgatgcctgtcctttattgatgcccatcagggctttcgtgatctatcaaggccacagtcacaagaaagcgggtacacaagctcaaccagctcagaagagtgtgaagtaaacttgtactcaggcaaacacacttcacccaccgaggaagatggattctggcctctccacggttatggctcttttgtttcactcgtcatggaggcacaggctgctaacgccaacctaacctcttggttaccggtcgatatgaccagcggccaagtcgcagagatggtcgcatttgaccgccaagctgtgtcagctgtgcgctcgaaggtggctgaggcgaatgaaacgcttcaacagatcattgaggatatcccaacactatcggcatccgaaaacgatacctttctcccgtctcttccaccccgcgctctagtggagccgtctatcaacgaatatttcaagaagctgcatccacgactccctatatttagtcgacagactattatggacgcagtggaatctcagtacacaatcagaactgggcctccggacctggtttggattacctctttcaactgcattgtgcttcaggccctgactcaaacatcaattgcgaacaaagtcgtgggatgcacaggacaagacataccaatagattatatgatcataagcctgctgcgtaatatcaggcagtgctataatcgattggaaactcttgttaaaccccggctatcgaatatacgggccctcttttgtttggcacttgtggcaatggagtattttgatttcgcaatttttctgactatctttgctcaagtctgcgagttgtccaggctcattggactccatttaacgacaacgaccccgccaacggaagatggggctgtgggcgaccagcctaaagacttgttctggagcatcttcctcgtcgataagcacgtatccatcattgggggcaaggcctgcctattgccctcgtatgactgcagcgtaccattgcctccatatgactccgctgcgccactaccaaatgcttttgcggcacgcatacgcttggcattcattcttgaggagatatatctgggcttatactcagcaaaatccagcaaaatggaacagagtcgcgtccgccgccgtatccgcagaattgctcgaaaacttagccagtggcacgtgcaacatgagcatgtactgcgtaccggagatccgaataggcctctcgaagagtatatctgtgcaacgcagttgaggtttgcactctcgagctgttgggtacttctgcataaacgcatttggagccaggaaaggggcgctgtctgcctacaacacgctcgggattgtctgatgctgttcaagcaattgtgcgatgggtgtaaatctggtttcagcaatttcgacagcattgtcctgaactattctttgatctcattcatgggaatctatgtccacattgtggaggaagaccagccgatccattcacaggacatggagatactcactttcttcgccatatacacgaaccgttcggcatccaataggtcatctgcatctatctcgtacaaattaagccaagtggccagtcgctgtagcgatattgccctcctcctccagaatttaagggagaggcgttttattccgacaacgatatcacgaagtccaacgccctcatggaacgagccaacctacatggattacgatgtcgccaatgcgtccactagcacaactagcaccggctcttcatataacttgaatatcagcccgcttggtgtacccggagacggccaggtctgggacatatacttcaacccgagagaaataccaatggatggtacaattgcgactccttctgaggatgcaacccaggatttgctgagcaatgatgctggccaatgccttggtttccccgacttttcacttggcattgacaacttctccgactttccacttggcattgacatgactagccaaagcgaatttggtcttattatggaggaggacataattcgatatgagagactactagataggcccgtttag

SEQ ID NO: 26 - protein, 742 aa, Aspergillus terreus
MESAELSSKRQAFPACDECRIRKVRCSKEGPKCSHCLRYNLPCEFSNKVARDVEKLGSRVGDIEHALQRCLSFIDAHQGFRDLSRPQSQESGYTSSTSSEECEVNLYSGKHTSPTEEDGFWPLHGYGSFVSLVMEAQAANANLTSWLPVDMTSGQVAEMVAFDRQAVSAVRSKVAEANETLQQIIEDIPTLSASENDTFLPSLPPRALVEPSINEYFKKLHPRLPIFSRQTIMDAVESQYTIRTGPPDLVWITSFNCIVLQALTQTSIANKVVGCTGQDIPIDYMIISLLRNIRQCYNRLETLVKPRLSNIRALFCLALVAMEYFDFAIFLTIFAQVCELSRLIGLHLTTTTPPTEDGAVGDQPKDLFWSIFLVDKHVSIIGGKACLLPSYDCSVPLPPYDSAAPLPNAFAARIRLAFILEEIYLGLYSAKSSKMEQSRVRRRIRRIARKLSQWHVQHEHVLRTGDPNRPLEEYICATQLRFALSSCWVLLHKRIWSQERGAVCLQHARDCLMLFKQLCDGCKSGFSNFDSIVLNYSLISFMGIYVHIVEEDQPIHSQDMEILTFFAIYTNRSASNRSSASISYKLSQVASRCSDIALLLQNLRERRFIPTTISRSPTPSWNEPTYMDYDVANASTSTTSTGSSYNLNISPLGVPGDGQVWDIYFNPREIPMDGTIATPSEDATQDLLSNDAGQCLGFPDFSLGIDNFSDFPLGIDMTSQSEFGLIMEEDIIRYERLLDRPV

SEQ ID NO: 27 - DNA, 906 bp, Aspergillus terreus
atggagtctaaagtccagacaaatgttccattaccaaaggcaccccttacccaaaaagcccgtgggaagcgtacgaaaggcattcctgcattggtcgcgggtgcttgtgctggggcagttgaaatctccatcacctaccctttcgaatcggctaaaactcgcgcccagcttaagcggagaaaccatgatgtggcagctataaaacctggaatccgaggctggtatgctgggtatggagccaccttggtaggaaccacattgaaagcctccgttcaatttgcctccttcaatatttatcgctcggccctctcgggcccaaatggagagctctcaactggagcttccgtcctggctgggtttggggctggcgtgaccgaggctgtcttagccgtaaccccagcggaggcgatcaagacgaaaatcattgatgcaaggaaggttggaaatgcagagttaagtacgactttcggcgcgatagctggaatccttcgagatcggggaccgcttggattcttctctgcggttggtcctacaattttgcggcagtcgtccaatgcggcagtgaagttcactgtttataacgaacttattgggctggcccgaaaatactcgaagaacggcgaagacgtgcaccctctggcaagcaccttggtcggttctgttactggagtttgttgcgcctggtcgacacagccactggacgtgatcaagacgcgaatgcaatctcttcaggcaagacaactgtacggaaatacctttaactgcgtgaaaacacttctgcgcaatgaaggcattggggttttctggtccggcgtctggtttcggacagggagactttcccttacctcggccatcatgtttcccgtgtacgagaaagtctacaagttcttgacgcagccaaactga

SEQ ID NO: 28 - protein, 301 aa, Aspergillus terreus
MESKVQTNVPLPKAPLTQKARGKRTKGIPALVAGACAGAVEISITYPFESAKTRAQLKRRNHDVAAIKPGIRGWYAGYGATLVGTTLKASVQFASFNIYRSALSGPNGELSTGASVLAGFGAGVTEAVLAVTPAEAIKTKIIDARKVGNAELSTTFGAIAGILRDRGPLGFFSAVGPTILRQSSNAAVKFTVYNELIGLARKYSKNGEDVHPLASTLVGSVTGVCCAWSTQPLDVIKTRMQSLQARQLYGNTFNCVKTLLRNEGIGVFWSGVWFRTGRLSLTSAIMFPVYEKVYKFLTQPN

SEQ ID NO: 29 - DNA, 2391 bp, Aspergillus nidulans
atggctactgactggcaacccgagtgtatggtatcccaaaaccaagcagctctggagagcataggagcccattcagaccgagctcttcagaatacgtctgggaacgtgcaggcatactcagacagcctagcacaccatgacacgactggacgtgatgaccctctacagcattacaccctcaagtaccctcaccctccagtcccagtcccaagccatccactgccaactgccactgccaatctctaccatccccagcttttaagtcatcgataccaggtcaagaagctgcggcgtctccaatcgaatggttcctcatatgcagggtccagaagggggagaagttacttgaagtcacagaagtacttagagtatagggctcggccacgtcgggatactgggaaagatggtgaaccagtatggtcggacgaactggaggatgccttccagcaagctcttgaagcaaacccgcctatggggagacgaaagtggtccgaacgtggaaagtcctacggacgaaacgaactgattgcggagtacatctataaattgactgggaagcgaaggaccaggaaacaagtgtccagtcacttgcaagtacttgactcattcctcaagggtgaccctgattgggagagacttgtccgagaacaatcagatcgttcaactgcccagacgcaaccggtgggaccacgatggagaacctcgatggaccatttgccgtcgagtcactacggcactcacgcaacctcttcttacccggaacccatgaggctgatgcccccttactcggcagacttgcagctacctcagtactcacccacttcaactcaacaagacacaaacaacaacacaatacaaggccttagctttgacatgtgggtcagcgctccaaacaaaccggaccgtattgacgacgcgtaccatttgtatacccgcctccaaggcgaccaacgtcaaccgcccatgccgctggaagatctgaagaactggcgcgtgtcctttccccacctaagctcatcactctcagacgtgaacgatccgctgaactgcgaaataattcttctcgagaccaacctcgagctgatggatgactttcctcctatgggttctagattggggatccacctggaacttgacattgcaaatcctatgtctgggacggcgccaacggtcaaccagatggagaattggacatgtagtacttacatatacgaagacgggaggcgcacgatggaggcatatcacaacctcaccaagccgcatacaacaaaggttaagccgccatttgagtcatcgtggtgggcaaaaaccttcacgaaactgacacaagacaagcgggaagctgagagcaccggacatcaccacgctgctgatgagcgtacccgacggtattttcactctttgaccgcggtgcaggagatccgggctactgtacctccaagcttgcgacgtctacagaaccattatccaggttctcctgctgaagaaagcaagcggatggccatcatcctctggaagttccgccagactcgacccaacgaggttggcacgacgacatggcgaaagctgataacgtctccggaccgtgccttgaccaatagccctagaccgtccactgcaattgatcttcctcctctatccttagactctatcctgctaagcaagcctacttcgaacttataccaggcaccgcctcagcaccatgacctactgcaccagaatgccccctcgcagcagtcttggtccctctatcaaccatctcatgaccatgttaatagcttataccactccgccggcgccttcgattttctaaacagcatcacaaaaccggaagaggggttatcagataagacagccccaacctcagtgcttgaccccttccccaacctcacacaacagactactagccaaacggccggcatcaacgtttccagcggcacaccggtaatgcttcagatccctgatttatccctctcgtccaaccttggaacctatggactcggccatgaaagccactatgtgccgtcacaccataatgcagcaaatctgcacgatcacagcagcaccaccggactaggtcactacttcgccccaagcacccagtcactcgacgaaattagccattcccacgccccatggtcagctccaaacacaacaatctccggcgatactagcggcggcaactaccatcatctaccgtttacgacgtcagatcactccgttacggtatcgcgcgagtcgcaccagaatcacagctttgaggggctactgccttcggatgatctcgttggaatcgttgggggattatctggtgatcctaatatgaacggggcgggccccgaacatacatcttcggcatatgctgaacatactgcggttgaggctgtctag

SEQ ID NO: 30 - protein, 796 aa, Aspergillus nidulans
MATDWQPECMVSQNQAALESIGAHSDRALQNTSGNVQAYSDSLAHHDTTGRDDPLQHYTLKYPHPPVPVPSHPLPTATANLYHPQLLSHRYQVKKLRRLQSNGSSYAGSRRGRSYLKSQKYLEYRARPRRDTGKDGEPVWSDELEDAFQQALEANPPMGRRKWSERGKSYGRNELIAEYIYKLTGKRRTRKQVSSHLQVLDSFLKGDPDWERLVREQSDRSTAQTQPVGPRWRTSMDHLPSSHYGTHATSSYPEPMRLMPPYSADLQLPQYSPTSTQQDTNNNTIQGLSFDMWVSAPNKPDRIDDAYHLYTRLQGDQRQPPMPLEDLKNWRVSFPHLSSSLSDVNDPLNCEIILLETNLELMDDFPPMGSRLGIHLELDIANPMSGTAPTVNQMENWTCSTYIYEDGRRTMEAYHNLTKPHTTKVKPPFESSWWAKTFTKLTQDKREAESTGHHHAADERTRRYFHSLTAVQEIRATVPPSLRRLQNHYPGSPAEESKRMAIILWKFRQTRPNEVGTTTWRKLITSPDRALTNSPRPSTAIDLPPLSLDSILLSKPTSNLYQAPPQHHDLLHQNAPSQQSWSLYQPSHDHVNSLYHSAGAFDFLNSITKPEEGLSDKTAPTSVLDPFPNLTQQTTSQTAGINVSSGTPVMLQIPDLSLSSNLGTYGLGHESHYVPSHHNAANLHDHSSTTGLGHYFAPSTQSLDEISHSHAPWSAPNTTISGDTSGGNYHHLPFTTSDHSVTVSRESHQNHSFEGLLPSDDLVGIVGGLSGDPNMNGAGPEHTSSAYAEHTAVEAV

SEQ ID NO: 31 - DNA, 2313 bp, Saccharomyces cerevisiae
atggataacgttgtagatccgtggtatataaatccctcaggcttcgcgaaagacactcaagatgaggagtatgttcaacatcatgataatgtcaatcctaccatacccccacccgacaattatattttgaataatgaaaacgatgatggcctcgataacttgttaggtatggactactataacatcgatgacctgttgactcaagagttaagagatctggatattcctttagtgccttctcctaagacgggcgatggttcttctgataaaaagaatattgatagaacttggaaccttggtgatgaaaacaacaaagtctcccactatagcaaaaaatcaatgtcctcacacaagagaggtctaagtggcacagcgatatttggatttctcggccataataagacattgagtatttccagtttacagcaatccattctaaatatgtctaaagatccgcaacccatggaactcataaatgaattgggtaatcataatacggtaaaaaataacaatgatgactttgaccatataagggaaaatgatggtgaaaatagctatttgagccaagttttgttgaaacagcaggaggagttaagaattgctcttgaaaaacaaaaggaagtgaacgaaaaattggagaagcagttgagagacaatcaaatacagcaagaaaagttgcgtaaagtattagaagagcaagaagaggtggcgcagaagttggtttctggggctacaaattctaattccaaacctggatctccagtaatactaaagacacctgccatgcaaaacggtagaatgaaagataatgctataatcgtcacaacgaactctgcaaatggcggatatcaatttcctcctccgacgttaatatcgcctcggatgtcaaatacttcaataaatggttcaccatccaggaaataccataggcaacgatatccaaataaaagcccagaaagtaatggattgaaccttttttcctctaacagtggttatttgagagattctgaactgctttcattttctccacaaaattataatttaaacttggacggcttgacttataatgaccataataacaccagtgataaaaacaataatgataaaaaaaatagtactggtgataacatattccgtctgttcgaaaagacttccccgggtgggctaagtatctctccaaggataaatggaaatagtttgagatcgcccttcctcgtcggcacagataaaagcagggatgatcgatatgctgctggcacgttcacgcctagaacacagttgtcacctatccacaagaaaagggaatccgtagtttccacggtctcgacaatatcacaactgcaggatgacactgaacccatccacatgcgaaatacccagaacccaacattaagaaatgcaaacgctttagcgtcatcaagtgtactacctcctattcctggttccagcaataacactccaattaagaattctttgccacaaaaacatgtatttcaacatactcccgtcaaagctccaccaaagaacggaagtaacctagctccgcttctaaatgcaccggatttaacagatcatcagttagaaattaagacacccatacgaaataacagtcactgtgaagtggaaagctatccgcaagtaccacctgtcacacatgatattcacaaaagccccactttgcatagtacgtctcctttaccagatgaaataatacctaggactacgccaatgaaaataaccaagaaaccaactactctgcctccgggtaccattgaccagtacgtcaaggaactacccgacaaactattcgagtgcttataccctaactgtaacaaagtattcaagcgtagatacaacataaggtcgcatattcagacacatttgcaagatagaccgtattcatgcgactttcccggttgcaccaaggcgtttgttcgcaatcatgatttaataagacacaaaatctcccataatgccaagaaatacatctgcccatgcggaaagagatttaatagggaggatgctctaatggtgcatagaagtcggatgatttgcaccggcggtaagaaattagaacattcgatcaacaagaaacttacatctcccaaaaaaagcctgcttgacagcccgcatgacacaagtcccgtaaaagaaactatcgcccgggataaagatgggagcgtcctaatgaaaatggaggaacagctgcgagatgatatgcgcaaacatggattactggatccacccccatccacagcagcgcacgagcaaaactcgaaccgcaccctttcaaacgaaactgatgctctctga

SEQ ID NO: 32 - protein, 770 aa, Saccharomyces cerevisiae
MDNVVDPWYINPSGFAKDTQDEEYVQHHDNVNPTIPPPDNYILNNENDDGLDNLLGMDYYNIDDLLTQELRDLDIPLVPSPKTGDGSSDKKNIDRTWNLGDENNKVSHYSKKSMSSHKRGLSGTAIFGFLGHNKTLSISSLQQSILNMSKDPQPMELINELGNHNTVKNNNDDFDHIRENDGENSYLSQVLLKQQEELRIALEKQKEVNEKLEKQLRDNQIQQEKLRKVLEEQEEVAQKLVSGATNSNSKPGSPVILKTPAMQNGRMKDNAIIVTTNSANGGYQFPPPTLISPRMSNTSINGSPSRKYHRQRYPNKSPESNGLNLFSSNSGYLRDSELLSFSPQNYNLNLDGLTYNDHNNTSDKNNNDKKNSTGDNIFRLFEKTSPGGLSISPRINGNSLRSPFLVGTDKSRDDRYAAGTFTPRTQLSPIHKKRESVVSTVSTISQLQDDTEPIHMRNTQNPTLRNANALASSSVLPPIPGSSNNTPIKNSLPQKHVFQHTPVKAPPKNGSNLAPLLNAPDLTDHQLEIKTPIRNNSHCEVESYPQVPPVTHDIHKSPTLHSTSPLPDEIIPRTTPMKITKKPTTLPPGTIDQYVKELPDKLFECLYPNCNKVFKRRYNIRSHIQTHLQDRPYSCDFPGCTKAFVRNHDLIRHKISHNAKKYICPCGKRFNREDALMVHRSRMICTGGKKLEHSINKKLTSPKKSLLDSPHDTSPVKETIARDKDGSVLMKMEEQLRDDMRKHGLLDPPPSTAAHEQNSNRTLSNETDAL

SEQ ID NO: 33 - DNA, 3972 bp, Saccharomyces cerevisiae
atggctaacgtagaaaaaccaaacgattgttcaggctttcccgttgttgacttgaattcgtgcttttctaacggcttcaataatgagaaacaagaaatagaaatggaaacggatgattcaccgattttattaatgtcatcatcagcttccagagaaaactcaaacactttctctgtgatacagaggacgccagatggaaagatcattaccacaaataataatatgaactccaagattaacaagcaactggacaagttgcccgaaaatttaaggcttaatggtagaacccccagtgggaaactaaggtcatttgtttgcgaggtttgtacgagagcgttcgcaagacaagagcacttgaaaagacattacagatcgcatacaaatgaaaaaccttatccctgtggcctctgcaacagatgctttactaggagggacttactgatcaggcatgctcaaaaaatccatagtggtaatttaggggaaacgatttcccataccaagaaagtgtcgagaactataactaaagctcggaaaaattctgcatcctcagtcaagtttcaaactccaacctatggtactccagataatggtaattttttgaatcgcactactgccaatacaagaagaaaagcaagccctgaagctaatgttaaacgtaagtacttgaaaaaactgacgcgcagggcttcatttagcgcacaatcagcatccagctatgctttgcccgaccaatcttcgctagaacaacatccaaaggatcgtgttaaattttctacgcctgaattagttccacttgacttgaagaatcctgaacttgactcttcgtttgacctgaatatgaatctagatttaaacctaaatctagattccaatttcaatatagcattaaaccgttctgattcttctggatcaacaatgaatttggattataaattgcccgaatcagcaaataactacacatattcttccggctcaccaacccgcgcatatgtcggcgctaacacgaattctaagaacgcttcatttaatgacgcagacttattgtcgtcgtcgtactggataaaagcctataatgatcatttgttttcagtatctgaaagtgatgaaacttctccaatgaactctgaattaaacgacactaaattaatcgtcccagattttaaatcgactatacatcatttgaaggattcaaggtcctcctcttggactgttgctatagataataatagcaataacaataaggtatcagacaaccaacctgatttcgtcgattttcaagaactgctggataatgatactttaggtaatgatttgttagagaccactgccgttttaaaagaatttgaacttttacatgatgatagcgtaagtgctaccgccacgtcaaatgagattgacctttcccatttgaacctatcaaactctccaatttctcctcataagttaatttataagaataaagaggggaccaatgacgatatgttgatttctttcggactcgatcatccttccaatcgcgaagatgatctggataagctatgtaatatgaccagagatgttcaagccatattcagtcaatatttgaaaggagaagagtctaaacgatccctggaagactttttatcaacgtcaaacaggaaagaaaagccagatagcggcaactatactttttatgggttagattgtttaacgttatcgaaaatatcaagagctctgccggcctccactgtgaacaacaatcagccatcgcattccatagaatcaaagctatttaatgaaccaatgagaaatatgtgcattaaagtgcttagatactatgaaaagttcagtcatgatagtagtgagagtgtcatggactctaatccaaacttgctgtccaaagaattgttaatgccagctgtgagtgaattgaacgaatatttagatcttttcaagaataatttccttccccatttccctattattcacccaagcttgcttgatttggatttggatagcttgcaacgatatactaatgaggatgggtatgatgacgctgaaaacgcgcagttgtttgatcgattaagtcaagggacagataaagaatatgattacgagcactatcaaatcttgtccatttcgaaaatcgtttgtttacccttatttatggccacatttggttctttgcataagttcggttacaaatctcaaacaatagaattgtatgagatgagtagaagaattctacattcttttttggagactaaaagaaggtgtcgcagtacaacagtaaatgacagttatcagaacatttggttgatgcaatccctaatattgagcttcatgttcgctctagttgctgattatttggagaaaattgactcctctttgatgaaaaggcaattgtccgcattatgttcaacgatcagatcaaactgtttaccgacaatttctgcaaattctgagaagagtatcaataataacaatgaacctttaacatttggttctcctcttcaatacatcatttttgagtcaaaaattagatgcaccttaatggcttatgatttttgtcagttcttgaaatgtttcttccatattaaattcgatttgtctataaaggaaaaagatgttgaaaccatttatattcccgacaatgagtcaaaatgggccagtgaatcgataatatgtaatgggcatgttgtgcaaaagcaaaatttttatgattttagaaacttttattacagtttcacgtatggacacttacactcaataccagaatttttagggtcatctatgatttattatgaatacgatttaagaaaaggaaccaaatcacatgtgtttttggatcgaatcgatacgaaaaggctagagaggagtcttgacacttcttcctatggcaatgataatatggcagcaaccaataaaaatattgcgatcttaattgatgacaccataattttgaaaaataatttaatgtcaatgagattcatcaaacagattgatcgctcgtttactgagaaggttagaaaaggacaaatagcaaagatatatgattcctttttgaactctgtgaggttgaattttttgaagaattattcagttgaagtattgtgtgaatttttagtagcgttgaacttttcaatccgtaatatttcgtctttatacgtagaagaagaaagtgattgctcccaaagaatgaattctccagagctgccaaggatccacctgaataatcaagcgctttctgtcttcaatttacaaggctattactattgcttcatcctaattatcaaatttttattggattttgaagcaactccaaattttaagttactgagaatttttattgagttgagaagccttgcgaattctattttacttcccacactttcaagattgtatccgcaagagttttctggatttcctgatgttgtatttacgcaacaatttataaataaagataatggtatgcttgtccctggtttatccgcaaatgaacaccataatggtgcaagtgcagctgttaagactaagttagccaaaaagatcaatgttgaagggcttgcaatgtttattaatgaaatcctagttaactcttttaacgatacctcttttttgaatatggaggatcctattcgaaatgaattttcctttgataatggggacagggcagtgacagacttgcctcgttcagcacatttcctatcggataccggcctagaaggtattaacttcagcggcttaaatgattcgcatcaaactgtttctactttgaatcttttacgttacggggaaaatcattcatcaaaacataaaaatggtggaaaggggcaaggatttgccgaaaagtaccaattatctctgaaatatgttactattgccaagttatttttcaccaatgttaaagaaaactacattcattgtcacatgttagataagatggcaagtgatttccacactttggaaaatcatctaaagggaaacagttga

SEQ ID NO: 34 - protein, 1323 aa, Saccharomyces cerevisiae [sequence omitted]

SEQ ID NO: 35 - DNA, 2001 bp, Saccharomyces cerevisiae
atggatatcgagcctactttcaaagggtacattgaagatgaagatgacgctttgcttattcttcaagcaactttggatggcaagttaaagcatataccaagaaggccttatgaaatagaaagaccttatttgatcgtatcaggtagtatattcgtttttattgaagagatatcgggcatcaagagatggactgatggcgtttcttggtctccatcaagaatatcaggcaagtttctaatatacaaggaactagacaaggaaaacgccgggtctaatgctaatgctacttcgagtggcagtactgattccgccgtcattacggatggaacttctggcgcgagaaataacccttcttcgtcgaaaatcaagctacctcctttgaagaatcaccagtttgatttgccacctactatgggccattcaagttttgagtcagagcaagacacctccatttctccatcaaaccgttcgaacttacctttaaagtatactggcctggtgaagaagacaatatctgtgaagctgaagagacctccattcaactcgattgaaaatttacatattgtctcttattattctgtaaaagatataaaacaaaattgtctagtgactcctaaagcttctccttttttgaaagatgttagaccttcacaggaactaattgtcgcgatgggaaatacaaccttaggcaacgtgaaaaacaattccactaccaccggtaatggtcctaataatataaacaataaaagcaactcttccactcccctgaatactgttatttccacgaataacaatagtgctaatataaatgctgctggcagtaatcaatttactagtgcaaacaaaaattattattataaaaatgatgaaagctctggatacccaatcactcaatttgctcccgcattaccatcaacaactttgatgtatacggcgaatccaccttatatcactcaatctcctgataacactaacgctactggtatgaatacacatgttaataataacaataataatagtaataacagtagtaatagtaataatagtaacaataataataataataataataataataataataacaataataataatattaataatattaataatgtcaatactaatgcagggaacggtaacaatccaaatagattccataacgcctcttttgcttataacaccaccggtgactttattaatccgcaacaacaaggacaaatttcttatccattttattatacaacaattccgataaacaatcctaactattataccacacaacctccaaaccctgtaacaaacgcttcaacgaacgagaatcaaggctattccacctcctcaactcaacacccttattatgggcatcctactgaaagtcaatcagcatcagcagccgcaggcgctactggcactcctggtacagccgagaatgtccttcccgtatccagtatgcagccactactccatcaagccaataataatagtgcaagctctgctacctctacagctccttatccggtgtattctatgaatgtgaatgttccttattacaattcttctgcttctgcatacaagagggcacaagaaaatactacttcaaatacgaatgcagaaccttctggtgctacaagcactaactcaggcaccatgctatcaaatcctgcatacgctaattctcagtacactccatcgcaagtgtattaccagggattcccccaatatgccatggcaagtgctcaaaatccgtctatgtatcaacaccagcaccaacatcctttgcccactgtatatccaatagcgacgcctcaacaaaatataatgagctctggtcacactttgagcactattggatctgatcctcaacatcatcactatcaacaagagcccaacgaccacaaaaacttcgctatgggtcacgcgaacaataatatcttaaacatcaccaataatgatacgatgaacaacctcaatacaaacacttcaactactacacaataa

SEQ ID NO: 36 - protein, 666 aa, Saccharomyces cerevisiae
MDIEPTFKGYIEDEDDALLILQATLDGKLKHIPRRPYEIERPYLIVSGSIFVFIEEISGIKRWTDGVSWSPSRISGKFLIYKELDKENAGSNANATSSGSTDSAVITDGTSGARNNPSSSKIKLPPLKNHQFDLPPTMGHSSFESEQDTSISPSNRSNLPLKYTGLVKKTISVKLKRPPFNSIENLHIVSYYSVKDIKQNCLVTPKASPFLKDVRPSQELIVAMGNTTLGNVKNNSTTTGNGPNNINNKSNSSTPLNTVISTNNNSANINAAGSNQFTSANKNYYYKNDESSGYPITQFAPALPSTTLMYTANPPYITQSPDNTNATGMNTHVNNNNNNSNNSSNSNNSNNNNNNNNNNNNNNNNNINNINNVNTNAGNGNNPNRFHNASFAYNTTGDFINPQQQGQISYPFYYTTIPINNPNYYTTQPPNPVTNASTNENQGYSTSSTQHPYYGHPTESQSASAAAGATGTPGTAENVLPVSSMQPLLHQANNNSASSATSTAPYPVYSMNVNVPYYNSSASAYKRAQENTTSNTNAEPSGATSTNSGTMLSNPAYANSQYTPSQVYYQGFPQYAMASAQNPSMYQHQHQHPLPTVYPIATPQQNIMSSGHTLSTIGSDPQHHHYQQEPNDHKNFAMGHANNNILNITNNDTMNNLNTNTSTTTQ

SEQ ID NO: 37 - DNA, 1302 bp, Aspergillus nidulans
atggagcccccagcgatcagccagcaatccacacccacggccccggggggaacgcaagggacacgcaaactgcgcgagagttgcatctcgtgctccagatccaaggtcaagtgcaataaggagaagcccacatgcagtcgatgcgtccgccgtggtctgccttgcgagtatatggtttccaggcgcactggacgcactcgcgtcattggtgttgagcagccaaagacagcaccatcaccaacaacaccgacgaatacgacagcagctactacagcaacgaaggcaggaccaccagttacaacagacagtgctgttcatacacctgtcattactacggcgccctctcccaagccggtgcagatccagtctcctccagccgaaccagatctctggggcgccatcctgtctccgaatacttccacctccaccgacctatcgtcactcctctcggtgaatacaaatttcagtcagctcttcgcctcgctttctccttcgcttcttgagggtatggatggcatggatgccgaaatgcacgcgccggagctgggcgcattgtcggtcgccgacccatcgtcctccatgatgcaggggttagaggcccctaacgctgcccaaccaccgtcttcgaacaccacaagccactcctactgcctgtccatctgcctggatactctcatgcggctctttccgaatgctggcgctaactgcgagcgacccgggcacgagagcaaccccggcaaactgttcactatcgagtccgttattgaggacaacaaacaaatcttggacacagcgcagacaatcctggcttgccgctgcgccgaggatgagtacgtggtcactctcgtctcacttattgtcttcaaggttcttggatggtacgtcgccgcggctcgggataggtcgtcggacccggggcgcgaagaagacttcaactggtcgactgcccaagacagtcgtagaggttcggtctcttcctttgaggagcaggtgctgcatcttcccaccgtcgtcggcacttattgcattgatggccatcatcagagccgcatggcagcccagctggtgctgagcgagctataccgcgtccaacgactggtgactcaggtaagccgtcgcctagaatctattcgccgccgctcctcgagcagctcgagctctgcctctagtaatacaacggactctgacggcgggatgtcgacccccttgtcgtcgaccaccctggtccatctagaagacgatttgcgcaagcgcctgcgtgccgtctcaagcgaaacgatcagcatcctccgccacgcctga

SEQ ID NO: 38 - protein, 433 aa, Aspergillus nidulans
MEPPAISQQSTPTAPGGTQGTRKLRESCISCSRSKVKCNKEKPTCSRCVRRGLPCEYMVSRRTGRTRVIGVEQPKTAPSPTTPTNTTAATTATKAGPPVTTDSAVHTPVITTAPSPKPVQIQSPPAEPDLWGAILSPNTSTSTDLSSLLSVNTNFSQLFASLSPSLLEGMDGMDAEMHAPELGALSVADPSSSMMQGLEAPNAAQPPSSNTTSHSYCLSICLDTLMRLFPNAGANCERPGHESNPGKLFTIESVIEDNKQILDTAQTILACRCAEDEYVVTLVSLIVFKVLGWYVAAARDRSSDPGREEDFNWSTAQDSRRGSVSSFEEQVLHLPTVVGTYCIDGHHQSRMAAQLVLSELYRVQRLVTQVSRRLESIRRRSSSSSSSASSNTTDSDGGMSTPLSSTTLVHLEDDLRKRLRAVSSETISILRHA

SEQ ID NO: 39 - DNA, 2073 bp, Saccharomyces cerevisiae
atggaaggcttcaatccggctgacatagaacatgcgtcaccgattaattcatctgacagccattcatcctcctttgtatatgctctacccaaaagtgctagtgaatatgtagtcaaccataatgagggtcgtgcaagtgcaagtggaaatccagccgcagtgccgtctcccataatgacactgaatctcaaaagcacacattccctcaatattgatcagcatgttcatacctcaacatcgccgacggaaactattgggcatattcatcatgtggaaaagctgaatcaaaacaatttgattcatctggatccagtacccaactttgaagataagtccgatattaagccttggttgcaaaagattttttatcctcaaggaatagaacttgtgatagaaaggtcggacgcatttaaagttgtcttcaagtgtaaagctgctaaaaggggaaggaacgcgagaaggaaaagaaaagataagcccaaaggacaggaccacgaagacgagaaatccaagatcaatgatgacgaattagaatatgcgagtccttctaatgccacagtaaccaatgggcctcaaacatcgcccgatcaaacatcctccataaagccaaagaaaaaaagatgtgtatcgaggtttaataactgtccgtttagagtacgagctacttattcgttaaagaggaaaagatggagcattgttgtaatggacaataaccattcacatcagctaaagtttaaccctgattccgaagagtacaaaaaattcaaagaaaaattaagaaaggataatgacgtagatgcaatcaagaaattcgacgaattggaatacagaactttggccaatttgcccattccaacagctacaatcccctgtgattgtggtttaacaaatgaaatacaaagtttcaatgtcgtattgcccactaacagtaatgttacttcatcagcatcctcttcaactgtatcgtccatatcccttgattcatcgaatgcatctaaaaggccatgcttaccctctgtaaataacaccggtagtatcaataccaataacgtaaggaaaccgaaaagccagtgtaagaataaagacacactcttaaaaagaaccaccatgcagaactttctcacaactaaatcaaggctgcgtaagaccggtacgccaacatcttcgcaacactcatctacagcattttcaggatatattgatgatcctttcaatttgaatgaaatcttgccactgccggcatccgatttcaagctaaacactgtaacaaatttgaacgaaattgactttacgaacatttttaccaaatcgccgcatccacatagcgggtctacccatccaagacaagtcttcgaccaattggacgattgttcctctatactcttctctccattaactacaaacacgaataatgaatttgaaggagagtcagatgattttgttcattctccatatttgaactcagaggcagatttcagccaaattcttagtagtgctcccccagtccatcatgacccaaatgaaacacatcaggaaaaccaggatattattgatagatttgctaatagttcccaagaacataatgagtatattctacaatatttgacgcactccgatgctgctaaccacaataacatcggcgttccaaacaacaattcacattcgctaaatactcagcataacgtttctgatctgggcaactcacttttaagacaagaagctttagttggcagctcttcaacaaaaatcttcgacgaattgaaatttgtacaaaatggcccacacggttctcaacatcctatagattttcaacatgttgaccatcgtcatctcagctctaatgaacctcaagtacgatcacatcaatatggtccgcaacagcagccaccgcagcaattgcaatatcaccaaaatcagccccacgacggccataaccacgaacagcaccaaacagtacaaaaggatatgcaaacgcatgaatcgctagaaataatgggaaacacattattggaagagttcaaagacattaaaatggtgaacggcgagttgaagtatgtgaagccagaagattag

SEQ ID NO: 40 - protein, 690 aa, Saccharomyces cerevisiae
MEGFNPADIEHASPINSSDSHSSSFVYALPKSASEYVVNHNEGRASASGNPAAVPSPIMTLNLKSTHSLNIDQHVHTSTSPTETIGHIHHVEKLNQNNLIHLDPVPNFEDKSDIKPWLQKIFYPQGIELVIERSDAFKVVFKCKAAKRGRNARRKRKDKPKGQDHEDEKSKINDDELEYASPSNATVTNGPQTSPDQTSSIKPKKKRCVSRFNNCPFRVRATYSLKRKRWSIVVMDNNHSHQLKFNPDSEEYKKFKEKLRKDNDVDAIKKFDELEYRTLANLPIPTATIPCDCGLTNEIQSFNVVLPTNSNVTSSASSSTVSSISLDSSNASKRPCLPSVNNTGSINTNNVRKPKSQCKNKDTLLKRTTMQNFLTTKSRLRKTGTPTSSQHSSTAFSGYIDDPFNLNEILPLPASDFKLNTVTNLNEIDFTNIFTKSPHPHSGSTHPRQVFDQLDDCSSILFSPLTTNTNNEFEGESDDFVHSPYLNSEADFSQILSSAPPVHHDPNETHQENQDIIDRFANSSQEHNEYILQYLTHSDAANHNNIGVPNNNSHSLNTQHNVSDLGNSLLRQEALVGSSSTKIFDELKFVQNGPHGSQHPIDFQHVDHRHLSSNEPQVRSHQYGPQQQPPQQLQYHQNQPHDGHNHEQHQTVQKDMQTHESLEIMGNTLLEEFKDIKMVNGELKYVKPED

SEQ ID NO: 41 - DNA, 1989 bp, Aspergillus nidulans
atggcctcaccagccgctccgaaacacaaacctttcaagcaggcctgtgacaactgtcgccggaggaaaatcaagtgctcacgagagctcccgtgcgacaagtgccagcgcctgctcctttcctgctcctacagcgatgtgctgcgtcgcaaagggccgaaatttcggactctataccctctagcgcctatccatccactagtggccagagaccgacagattctccagtatgatcctccacgattctctgcagagagggaatggtatgcagagcctacgagctacccggtcggcggctcgcccacgtctccgcccttcatggaagagccgcaatatctgccgcctgaacaccctgactcattcagccggctgcctccaccagaactcgtctcttcgccggattctctgaactccctatcggactctccgactgcggtgctgtttcgttcgccgcggattctgaccgcacctgtgcttctggcgcacgtcaatgtctacttgaaatatatgtttcctatcatgcccgtggtccgaagagaagagctccagcaggactgccaccatccagagcgtctaactccccagcggtacgcctttctggcctccctatgtgccgccacacatatccagctgaaactcgacggagcaacgcccgtcgcggatccttcgcattttcaggccggtgagaactcatcaatgtccggtgaagaactgctcgccgaagccgtgcgcgcaaggaaagattgcgacccaattgaggatatgaatgttgagagtcttctaacctcattcttcctatttgcttcatacggaaatctagaccgccaggaccacgcatggttctatctttgccaggcgacatcaatggttttcgcattgggcttgcaccgcgaatcaacatacgccgagttgaacaccgaagaagcagaacagaagcgacgggtcttctggctgctcttcatcacagaacgaggctatgccctccaacaagcgaaacctgtcatgctccgcaactccatccacaaaccgcaagtcctgtgctccgacgacccgattctcgcctacggcttcatcaacctcatcggcgtcttcgagagcctcagcgtcaacctttacgactgggtctcagcagggggaagcgtaagcggaggtggaaataaccgagacggctcctccgagatgccgcctacatcagccatccaggcaactctcagcaaaccgatctcgctcgagggtgtctcggaaatccaaaaggttgatatcctcatcacacagcagtggcttcaggccatgatgtggaaactctccatgacgcgtgcatcgcagccaggctcgcggaatgagacggtcctcccgttccatcttcctgtaatggtgggcaaggctgttatgtctgtcattgcggaggcatcgcagggggctgtcgacgcgcatgggattgggatggaacaaaagctcttcgatcttggtacatctatcgccgacgtctcacgttctctctccacaaaagctgcaaacagcctcgccgagtcaaccgtcgacccccgcgagctcctctggggtatcctttccaccctctcccgcatccgtggctcccagtcgtacctcttcccatctctccttgagcgctgcaaaggcaccctcggctttgattccccgacgccgctttctatcagtgacttccaccagattaatcctccgcttctcaattccgctagctcttcttcaattgcttctgaaactttagatatctctggaccatggcccgcggctgatgacaatactatggattctagcacaggcagcaggacaacaaattcgtgtgcatgggaaataacttctggtgatacgaacgaccagaaccagactagtgatcagccgccttcattgtctggatcatcgtcagtacccctttcggtctcgcgaatgcattcgtccactagtatggctgcagaactctcgtttcaagctgggaggttattgacttga

SEQ ID NO: 42 - protein, 662 aa, Aspergillus nidulans
MASPAAPKHKPFKQACDNCRRRKIKCSRELPCDKCQRLLLSCSYSDVLRRKGPKFRTLYPLAPIHPLVARDRQILQYDPPRFSAEREWYAEPTSYPVGGSPTSPPFMEEPQYLPPEHPDSFSRLPPPELVSSPDSLNSLSDSPTAVLFRSPRILTAPVLLAHVNVYLKYMFPIMPVVRREELQQDCHHPERLTPQRYAFLASLCAATHIQLKLDGATPVADPSHFQAGENSSMSGEELLAEAVRARKDCDPIEDMNVESLLTSFFLFASYGNLDRQDHAWFYLCQATSMVFALGLHRESTYAELNTEEAEQKRRVFWLLFITERGYALQQAKPVMLRNSIHKPQVLCSDDPILAYGFINLIGVFESLSVNLYDWVSAGGSVSGGGNNRDGSSEMPPTSAIQATLSKPISLEGVSEIQKVDILITQQWLQAMMWKLSMTRASQPGSRNETVLPFHLPVMVGKAVMSVIAEASQGAVDAHGIGMEQKLFDLGTSIADVSRSLSTKAANSLAESTVDPRELLWGILSTLSRIRGSQSYLFPSLLERCKGTLGFDSPTPLSISDFHQINPPLLNSASSSSIASETLDISGPWPAADDNTMDSSTGSRTTNSCAWEITSGDTNDQNQTSDQPPSLSGSSSVPLSVSRMHSSTSMAAELSFQAGRLLT

SEQ ID NO: 43 - DNA, 2631 bp, Aspergillus nidulans
atgtctgggttgactctcgggggtggttctggccgtgtgcgaccgacacaagccgctgccgcttttcccacctcgcatgatttcgccgaccctgatcgctcgtccgtcgcccgcaatgccaaccggccctcccgccgtttcgctgcacctccgcagctgtccgacgacttctcgctcgagtcacccactgattccgctcaagttcacgacaacctcctccaggacgctttattccccgaatggaaggccaattctcctcgaggggtcgacagccctgatgagatgcagaagaaggatccgttagcgactcaaatatggaagctctattctagaacgaaagctcagttgcccaaccaagagcgcatggaaaatttgacctggcggatgatggctctgagtctgaggcgtcaggaaagagagcgcgcccagcagcaagcccgtgcctccagccaaaagagtcctgttcctggcatgagtggcatcgctcagctccgtctgtctgatcgtgtttccaataccccgaccacaactgcagatactgtctcagatgctatgaaccttgacgacttcatcatccctttctctccgtctgaccacccatctccctccacaacgaaagcctccgaagccactactggtgctatacctatcaaagcccgcagggatcagtccgcgtcggaagccaccccagtacctgcatctttccctcacccggcccaggatcagcggagggagagtgagttcggatacgtaccgcgtagagtgcgcaagacgagcatcgatgagcgtcaattcttcaacctgcagattccgtcccgcaagcggccggccgagtcctcgcctcacgtaccgcctgtgtccaccagcatgctagctcatgacccggatttctcacatgctgtaccggagtataccttggatacttcgcatggactgtctctacagaatcagatgaacgctcagcagctcgccaatgctcagaaccacacctcccccaatatggcgttcgctctggatactttcaacctgggcgacgatcctatccttccatctgctggtccttaccagcagcaattcactttctcgcccagcgagtcaccgatgaccagcggtaacccgtttgccaacctctacgctcagactccgattgcctcttcactcaactcaaccgacttcttctctcctccgccgtccggctatcagtcgactgcttcgactcctcagcctgcgtatgatggcgaacactccaagtattttgatatgcccgtcgacgcgcggtcgcaacgccgggttgttcccgcttacattactcagcgatcatcgaatttgtctgcctcgctgcaacctcgatatatgtacaaccagggtggttcgtcccaggatattacacagcagaatgcccatatgggggcccagtcttcatccatgcaatcccctggcttttctatcccgcagcatgttgatccaacgcaagtgttgaatccgaacgagtttaacggtaaccacgccgcaatgttcagtttcggcgccgactcggatgttgaagatgacgatgggaaccaattttcggccggaggactggcaatgccagccgagttcggcgacgacagtatcagtgacatgaatagcaacatggcgtgggagacatcatatcccaactctttccagtcgctgcctgcttttgctgcacagcaccgaaagcatgttaccatcgggtctgcggacatgatggataccccgagcgagtggaaccagggcggaagcctaggtcgaactcacgagtcggctgcgtcagtcagcgaggtgcgcaatcgggatcaagaccctcgacggcagaagatcgctcgcacctcgtccactccaaacacagcccaactactacgccagagcatgcagaaccaatcgtcccacacgtctcccaacactccgcccgagtcgggtctaaacagcgctgctccatcgcggcccgccagtccaggcgggaccaagaacggagagcagaatggtcccaccacctgcacgaactgctttacgcagaccacaccgctgtggcggcgtaaccctgaaggtcagccgctgtgcaacgcctgcggtttgtttttgaagttgcacggcgtggtgcgcccactgtcgctcaagaccgatgtgatcaagaagcgtaaccgcaacagcgccaatagccttgccgttggctcttcacgggtatccaaaaagtcagcccgcaagaactcggttcagcaggtaactccgactgcgcctacctcgagccgggcccaaagcaatacgacatccgagtctcccccagcaatgccgggtagctccggccgaggctctggagtcgttcctattgcggctgccccgcctaaatctagctcagcggcgactacgtctccgggcacaaacaacggttgtggtgcggtacaggtggctcctaaacgtcagcgtaggctggaaaaggcctctgatgttgatatggcggaaagcccgtccagtacctcgtccggtggacgatccaaggttgttccattggcgccggctatgcctccagcggccgtcaacccagccaaccacagtatcgctgctggtcagggcgcaagccaggaatgggagtggttgacgatgagtttgtag

SEQ ID NO: 44 - protein, 876 aa, Aspergillus nidulans
MSGLTLGGGSGRVRPTQAAAAFPTSHDFADPDRSSVARNANRPSRRFAAPPQLSDDFSLESPTDSAQVHDNLLQDALFPEWKANSPRGVDSPDEMQKKDPLATQIWKLYSRTKAQLPNQERMENLTWRMMALSLRRQERERAQQQARASSQKSPVPGMSGIAQLRLSDRVSNTPTTTADTVSDAMNLDDFIIPFSPSDHPSPSTTKASEATTGAIPIKARRDQSASEATPVPASFPHPAQDQRRESEFGYVPRRVRKTSIDERQFFNLQIPSRKRPAESSPHVPPVSTSMLAHDPDFSHAVPEYTLDTSHGLSLQNQMNAQQLANAQNHTSPNMAFALDTFNLGDDPILPSAGPYQQQFTFSPSESPMTSGNPFANLYAQTPIASSLNSTDFFSPPPSGYQSTASTPQPAYDGEHSKYFDMPVDARSQRRVVPAYITQRSSNLSASLQPRYMYNQGGSSQDITQQNAHMGAQSSSMQSPGFSIPQHVDPTQVLNPNEFNGNHAAMFSFGADSDVEDDDGNQFSAGGLAMPAEFGDDSISDMNSNMAWETSYPNSFQSLPAFAAQHRKHVTIGSADMMDTPSEWNQGGSLGRTHESAASVSEVRNRDQDPRRQKIARTSSTPNTAQLLRQSMQNQSSHTSPNTPPESGLNSAAPSRPASPGGTKNGEQNGPTTCTNCFTQTTPLWRRNPEGQPLCNACGLFLKLHGVVRPLSLKTDVIKKRNRNSANSLAVGSSRVSKKSARKNSVQQVTPTAPTSSRAQSNTTSESPPAMPGSSGRGSGVVPIAAAPPKSSSAATTSPGTNNGCGAVQVAPKRQRRLEKASDVDMAESPSSTSSGGRSKVVPLAPAMPPAAVNPANHSIAAGQGASQEWEWLTMSL

SEQ ID NO: 45 - DNA, 1767 bp, Saccharomyces cerevisiae
atgtcaagcttatacatcaaaacaccactgcatgcattatctgctggtccggattctcatgcaaatagctcctattatgacaatcttttattgccttcattttccaatttatccagtaatatcagcaggaacaatatcacaaccgataacaatataaattcagcaagtcctaggaagtattcgtttcattcgctcaatgtgtcgccaattctttccccaatatctttggctaacgaaatacttggaaaaaaatcaaatactgcaccagcatcgccacatcatatggattacaatccaatttcctcattaacaccaggcaattcaccagaattcaacaaggcaagcttatctcagattagttttacaaatccattgaactatgggtctggcttaggtttttcctctaattcacaacctcgactaccattgttagacaggctatcgtccgtctctttatctaagagaccggagcgcccacaacaaagcctaccatcactaaggcatctgcaattattacccagtcctcttttacaagaaaacgcagcacgcttccctgatacatcaaaacgtacatctaattggaaaactgatcttacccattggtgtaaggatacaaactatcaagactatgttaaaatacgcgaagaagtggctcatttcaagccattaagtatacccaacttaactaataatcaaaataatgatagtttcaattacggcaaggaattggaatcgactaggtcgtccaagttccattccccgtctaaggaatcatttgatcgtaccaaactaattccttcgattctagaagctaaagatcaatttaaagatctttccaacaatgcatggagtattactcctcccgtcacaccgccgatgagtccaccaaccaatagaaccatggagcgcacgacgcttagaggagtagaggcctctttttttgaggggaaatccagcaataacgattcaatattcaatccaattattagtgaaaaattggttcaagaagttaaacatcaaagacaattacgtggaaattcatttcccatgccaaatgccagtcacaaaaagacgaacagtttcaaagctttgcaaataaaaaaattgcttgcgaatagagacattctatcgaacaattccaaatctaatgtaaggaaaccatctaagaacaaaatctcaaagcaagcatcaaatgttttcggtaacactgcaagacaattggtgatgaaactcgacaacgctagttacagttctgtctctgcatcttcatctccatctccctccacaccgacgaaaagtggcaagatgagatcaagatcatcctcacctgtgcgtcccaaggcatacactccaagcccaaggtcacccaattatcatagatttgctctcgactctccccctcaaagccctcgaagatcatcaaattcaagcataacgaaaaagggaagtagaaggtccagtggctcatcacccactcgtcacaccacaagagtgtgcgtgtcgtgtcattcgagtgattcgccctgttggaggccatcgtggtcgccaagaaagcaagatcagctatgtaactcttgtggtcttcgatataaaaaaacacatacaagatgtttgaacgatttatgtcgtaagatccccacaaagggtgaaataaacattatgaaatccaatggaatagacaaagaattcgtccccgaacgcaactgcgaaattgaagggtaccgttgcttattttgtaattacataactgagacagtagagaattga

SEQ ID NO: 46 - protein, 588 aa, Saccharomyces cerevisiae
MSSLYIKTPLHALSAGPDSHANSSYYDNLLLPSFSNLSSNISRNNITTDNNINSASPRKYSFHSLNVSPILSPISLANEILGKKSNTAPASPHHMDYNPISSLTPGNSPEFNKASLSQISFTNPLNYGSGLGFSSNSQPRLPLLDRLSSVSLSKRPERPQQSLPSLRHLQLLPSPLLQENAARFPDTSKRTSNWKTDLTHWCKDTNYQDYVKIREEVAHFKPLSIPNLTNNQNNDSFNYGKELESTRSSKFHSPSKESFDRTKLIPSILEAKDQFKDLSNNAWSITPPVTPPMSPPTNRTMERTTLRGVEASFFEGKSSNNDSIFNPIISEKLVQEVKHQRQLRGNSFPMPNASHKKTNSFKALQIKKLLANRDILSNNSKSNVRKPSKNKISKQASNVFGNTARQLVMKLDNASYSSVSASSSPSPSTPTKSGKMRSRSSSPVRPKAYTPSPRSPNYHRFALDSPPQSPRRSSNSSITKKGSRRSSGSSPTRHTTRVCVSCHSSDSPCWRPSWSPRKQDQLCNSCGLRYKKTHTRCLNDLCRKIPTKGEINIMKSNGIDKEFVPERNCEIEGYRCLFCNYITETVEN

SEQ ID NO: 47 - DNA, 1629 bp, Saccharomyces cerevisiae
atgggcaatcagtcattagttgtgcttacggaaagtaagggtgagtatgagaatgagacagaactacctgttaaaaaatcgtcacgagataataatatcggagaatctttaacagcaacagcttttacgcagtctgaagatgaaatggtagatagcaatcagaaatggcagaacccaaactattttaaatatgcatggcaagaatatctttttatattcacatgcatgataagtcagcttctaaatcaagcaggcactacacagactctttcgatcatgaatattctttcggacagttttggctcagaaggaaactcaaagtcatggctgatggcatcttttccgctagtttcaggctcatttattttgattagtggcagactaggtgacatatacggattaaaaaaaatgttgttagtaggatatgttctggttattatatggtctttgatttgtgggattaccaagtattctggtagcgatactttttttattattagtagagccttccaagggctagggattgcatttgttttacctaatgtgctgggaataattggtaatatatatgtaggtggtacttttcgtaaaaacatcgtgattagttttgttggtgcgatggcccctattggagcaactttaggttgtctttttgcaggactgatcggtaccgaggacccaaaacaatggccatgggcattctacgcgtatagcatagccgctttcattaattttgtgctctccatatatgccattccgagtactataccaacaaatattcatcatttttctatggattggattggttctgttttgggcgtgataggtctcattttattaaattttgtgtggaaccaagctcctatatcgggttggaaccaggcttacatcatcgtaattttaatcatttctgtgatttttcttgtcgttttcatcatttatgagattcgatttgccaagactccactattgccgcgcgcagttataaaggatcgtcatatgattcaaattatgctggctttattctttggatggggctcttttggcatctttacgttttattatttccaatttcaattaaatataaggcagtacacggcattatgggctggtggaacttactttatgtttttaatttggggtattattgccgccttactggtaggatttactatcaagaatgtgtctccatcagtgtttttgttcttttctatggtagcattcaatgtgggctcaataatggcaagtgttacaccggttcacgagacatactttcgtactcagttaggaacgatgataattttaagttttgggatggatctttcatttcctgcttcttccattatctttagtgataatttaccgatggagtaccaaggcatggctgggtcattggtgaatactgttgtcaattactccatgtccttgtgtctcggtatgggtgccacagtagagacacaggtcaattcagacggaaagcatcttttgaaaggctatagaggtgctcagtaccttgggataggattggcaagtttagcatgcatgattagcgggctttacatggtcgaaagcttcataaaaggccgcagggcaagagctgctgcagaatacgattgcactgtggcttag

SEQ ID NO: 48 - protein, 542 aa, Saccharomyces cerevisiae
MGNQSLVVLTESKGEYENETELPVKKSSRDNNIGESLTATAFTQSEDEMVDSNQKWQNPNYFKYAWQEYLFIFTCMISQLLNQAGTTQTLSIMNILSDSFGSEGNSKSWLMASFPLVSGSFILISGRLGDIYGLKKMLLVGYVLVIIWSLICGITKYSGSDTFFIISRAFQGLGIAFVLPNVLGIIGNIYVGGTFRKNIVISFVGAMAPIGATLGCLFAGLIGTEDPKQWPWAFYAYSIAAFINFVLSIYAIPSTIPTNIHHFSMDWIGSVLGVIGLILLNFVWNQAPISGWNQAYIIVILIISVIFLVVFIIYEIRFAKTPLLPRAVIKDRHMIQIMLALFFGWGSFGIFTFYYFQFQLNIRQYTALWAGGTYFMFLIWGIIAALLVGFTIKNVSPSVFLFFSMVAFNVGSIMASVTPVHETYFRTQLGTMIILSFGMDLSFPASSIIFSDNLPMEYQGMAGSLVNTVVNYSMSLCLGMGATVETQVNSDGKHLLKGYRGAQYLGIGLASLACMISGLYMVESFIKGRRARAAAEYDCTVA

SEQ ID NO: 49 - DNA, 1830 bp, Saccharomyces cerevisiae
atgctatcttcagaagattttggatcttctgggaaaaaggaaacttctcctgattcgatatcgatacgttcctttagtgccgggaataatttccaatcatcatcaagtgagaaaacttattctaagcaaaaatccgggagtgacaaacttatacatagatttgcggattcattcaaaagagccgagggtagcactacaagaactaagcaaataaatgaaaatacgtctgatttagaggatggcgttgagtctatcacgtcggattccaagttgaaaaagtccatgaagtcgcgccatgttgtcatgatgtctttagggacaggtattgggactggtcttttggtagctaatgcaaaaggtctacattacggtggtcctgctgcgctaataattggttacatcttggtttctttcgagacgtacttcatgatccaagctgcaggtgagatggcggtaacctatccgactttaccagcaaatttcaacgcatactcctccatattcatttccaaatcatttggattcgccacagtatggctttactgtttccaatggctaacggttttgcctttagagttaataaccgcgtctatgactattcaatttgggaatgataaaataaatccggacatttatattcttattttctatgttttcttagtattcattcatttcttcggtgtaaaagcctatggtgaaacggaattcatcttcaattgctgtaaaattttaatgattgcaggtttcattattctttctattgttatcaactgtggtggggccggaaatgacggttatatcggggccacttattggcataatccaggtgcttttgcaggtgacacatcgattggtaggttcaaaaacgtttgctatattttagttactgcttacttctcctttggtggtatggaattatttgcactaagtgttcaggaacagtctaaccctagaaaatctactccggtggcagccaagagaagcatttatcgtatcgttgtgatttatcttttgactatgatcctcattggattcaatgttccatataatgatgaccaactaatgggcgcaggcggatccgctacacatgcatctccctatgtcttagccgcttctattcacggtgtgaaaattgttccacatattatcaacgctgttattttgatttctgtggtttcagtggcaaattcctctttgtatgctggtccaagactgatttgctctttggcccaacaaggctacgcacccaagtttttagattacgttgacagagagggcaggcccttgagagctcttattgtgtgttgcgttttcggcgtcattgcttttgttgcagcttcatcaaaggaagagatcgtgtttacatggttagcagctatcgcaggcttgagtgaattattcacatggacttccataatgttgtcccatctgcgattcagacaagcaatgaaagtacagggaaggtctctagacgagttgggatacaaggccacaacagggatttggggttccatatacggtgtcttttttaatattttagtctttgttgcccaattttgggtagcattggcccccttaggtaatgggggcaaatgcgatgcggaatccttctttcaaaattatttagcttttccaatatggttggccttttacttcggatatatggtttacaaccgagattttacgctattaaatcccctcgacaagattgaccttgacttccacagacgcatttatgatccagagctaatgagacaagaggacgaagaaaataaagaaaaactaaggaatatgtctttgatgagaaaagcttatcatttctggtgttaa

SEQ ID NO: 50 - protein, 609 aa, Saccharomyces cerevisiae
MLSSEDFGSSGKKETSPDSISIRSFSAGNNFQSSSSEKTYSKQKSGSDKLIHRFADSFKRAEGSTTRTKQINENTSDLEDGVESITSDSKLKKSMKSRHVVMMSLGTGIGTGLLVANAKGLHYGGPAALIIGYILVSFETYFMIQAAGEMAVTYPTLPANFNAYSSIFISKSFGFATVWLYCFQWLTVLPLELITASMTIQFGNDKINPDIYILIFYVFLVFIHFFGVKAYGETEFIFNCCKILMIAGFIILSIVINCGGAGNDGYIGATYWHNPGAFAGDTSIGRFKNVCYILVTAYFSFGGMELFALSVQEQSNPRKSTPVAAKRSIYRIVVIYLLTMILIGFNVPYNDDQLMGAGGSATHASPYVLAASIHGVKIVPHIINAVILISVVSVANSSLYAGPRLICSLAQQGYAPKFLDYVDREGRPLRALIVCCVFGVIAFVAASSKEEIVFTWLAAIAGLSELFTWTSIMLSHLRFRQAMKVQGRSLDELGYKATTGIWGSIYGVFFNILVFVAQFWVALAPLGNGGKCDAESFFQNYLAFPIWLAFYFGYMVYNRDFTLLNPLDKIDLDFHRRIYDPELMRQEDEENKEKLRNMSLMRKAYHFWC

SEQ ID NO: 51 - DNA, 4437 bp, Saccharomyces cerevisiae
atgccctttttgaggaaaatagcggggacagcacatacacattctaggtctgattcgaactcatctgtgaaattcggccatcagccgactagttcggtagcatcaaccaaaagttcaagcaaaagccctcgtgcaacatctcgcaaaagcatttatgatgatattagaagccaatttcccaacctaacccccaactctacctcttctcagttttacgaaagcacgccagttatcgaacaatcctttaattggacgacagatgaccacatctcagctggaacgcttgaaaacccaacgagctttacaaacagttcttataaaaatgacaatggacctagtagcctctctgattcgaggaaatcctccggtggcaatagcgtaaatagtttgtcctttgacaagctaattctatcgtgggatcctacagaccctgatgaatggacaatgcatcgcgtcacctcatggtttaaatttcatgattttccagaatcctggatattgtttttcaaaaagcatcaattgtttggtcacagatttataaagttgcttgcatatgataatttcgctgtttatgaaaagtatttgccgcagactaaaactgcttcatataccaggtttcagcagttattgaaaaaaacaatgaccaagaacgtaacaaatagccatattcgtcagaagagcgctagcaaacttaaaagttccaggtcttccagcgaatcgatcaaatcaaaattaaaaaatagtaaatcgcaagaggatatttcaaattctagatcaacgtcagaatctgcattgagcccaacaaaatcgggcccttccaagaccgatgaaaagaattttttacattctacttcaacacaccaaaaaaccaaaagcgcaagttcactatacagaagaagttttatatccctaagaggctcatcatcgagcaatgcttcctcagcaaaatcaccttcaaacatcaagttaagtataccggctcggccgcactcaattattgaatctaacagtacacttaccaaatcggcgagcccacctgcatctccttcgtatcctagcatatttagaagacatcacaaaagtagttcatctgagtcgtcattattaaattccctttttggtagtggaataggcgaggaagctccaacaaagcctaatccacaaggtcatagtctgtctagtgaaaatttagctaaaggaaaatctaaacactatgaaactaatgtgtcttcacctttaaaacaatcttcactacccacttcggatgataaaggtaatttatggaataaattcaaaagaaagagccaaataggggttcctagcccaaatacggtagcttatgtaacgtctcaagaaactccatccttaaaatcgaattcgagtactgctaccttaaccgtacaaacggcagatgtaaatataccatctccatcttcatcaccaccgccaatacccaaaactgcaaacagaagtttggaggtcatcagcacagaagatacacctaaaatttcttcaaccacggcgtcttttaaagaaacgtatcctgattgtattaatccagacaagacagttccagtgccggtaaataatcaaaagtatagtgtaaagaactttttactggaccaaaaattttatcctctgaagaaaacagggttaaatgatagtgagaataaatatattctggttaccaaagataatgttagttttgttccgctaaacttaaaaagtgtagcaaaattatccagtttcaaagaatctgctctcacaaaattgggaatcaatcacaaaaatgtcactttccatatgacagactttgattgcgatattggtgctgcaattccagatgatactttggaatttttgaaaaaaagcttgtttttgaacacttctggaaaaatttatatcaaagaccaaatgaagcttcaacaaaaaccgaaacctgctcctctcacctcagaaaacaatgttcctttaaaatcggtgaaaagtaagagttcaatgaggtccggaacaagcagtctgatagcatcgacagatgatgtttccattgtcacttcgtcttctgacataacatcatttgatgaacatgcatcaggaagtgggcgcaggtacccccaaaccccgagttattactatgacagagtttccaatactaatccaactgaagaattgaattattggaatattaaagaagttctttctcatgaggaaaatgcaccaaaaatggtttttaaaacaagtccaaaattagaactcaacctaccagataaaggaagtaaattaaatattcctacccccataacagaaaatgaaagcaagagtagttttcaagtgctaagaaaagatgaggggactgaaattgatttcaatcatcgtagggaatcgccttatacaaaaccagaactggcaccaaaaagagaagctcccaagcctcccgcaaatacttctcctcagaggaccttatcaacttctaaacagaataaaccgatccgcctagtgagggcaagtacaaaaatttcgagaagcaaaagatcgaaaccattgccgccacaattattatcatctcctatagaagctagcagctcgtctcctgattcgcttacttcctcatatactcctgcttcgactcatgttttgataccgcaaccttataagggtgcaaacgatgttatgcgtaggttgaaaacagaccaggactcgacgagtacttccccatctttgaaaatgaaacagaaagtgaatcgctcaaattcaactgtatcgacttcaaattcaattttctattctccttcaccattgttaaaaagaggtaactcaaaaagagttgtttcgtcgacatctgcggccgatatatttgaagagaatgacataacattcgcggatgctccgccgatgtttgacagcgatgatagtgatgacgattctagttcatccgatgacattatctggtccaagaaaaaaacagctcctgagactaataatgaaaacaaaaaggatgagaaaagcgataacagttctacgcattctgacgaaatattctatgattctcaaacgcaggacaaaatggagagaaagatgacctttagaccatctccggaggtcgtttatcaaaatttagagaaattcttcccaagggctaacttagataagccaatcactgaaggaatagcttcaccaacatctccgaaatccttagacagcctactttcaccaaagaatgtggcttcatcgagaactgagccaagcactccttcccgtcccgtccctcctgatagctcatacgagttcatacaggatggacttaacggtaaaaataaaccattgaatcaagctaagacacctaaaagaacaaaaaccataagaaccattgcacatgaagctagtttagcaagaaaaaactctgtaaaactaaaaagacagaacaccaaaatgtggggtacaagaatggtcgaagtgaccgaaaaccatatggtgtcaattaataaagccaaaaattcgaaaggtgagtataaggaattcgcctggatgaagggtgaaatgatagggaagggatctttcggtgctgtttatttatgtttaaacgttactacaggtgagatgatggccgttaagcaggttgaggtccccaagtatagctcacaaaatgaagccattctaagtaccgtggaagcattaagatctgaagtgtccacgttaaaagatttagatcatcttaatattgttcaatacttaggttttgagaataaaaacaatatttacagtttgtttttagaatatgttgctggtggctccgtgggatccttgattagaatgtatggaagattcgatgaaccgttgatcaaacatttaacaacacaagtattaaaaggattggcatacctacactcgaaaggtattctccacagggatatgaaggcagacaacttacttttggatcaagatggtatctgcaaaatcagtgacttcggaatttcaagaaaatcaaaggacatatactctaattcggatatgaccatgcgaggaacagtcttctggatggctcctgaaatggttgatacaaagcaaggctacagtgcaaaagttgatatatggtctctgggatgcatcgttctggaaatgtttgctggtaagcgcccgtggtccaacttagaagtcgtcgcagccatgttcaaaattggaaagtcaaaatcggcaccaccaattcctgaggacactttaccattgatatcgcaaatcggacgaaattttctggacgcatgcttcgagataaatccagagaaaaggccaaccgctaacgagcttctttctcatccttttagtgaagtaaatgaaacattcaatttcaaatctaccagactcgcgaagtttataaagtcaaatgataagttaaactcttcaaaattaaggataacctctcaggagaataaaactgaatag

SEQ ID NO: 52 - protein, 1478 aa, Saccharomyces cerevisiae
MPFLRKIAGTAHTHSRSDSNSSVKFGHQPTSSVASTKSSSKSPRATSRKSIYDDIRSQFPNLTPNSTSSQFYESTPVIEQSFNWTTDDHISAGTLENPTSFTNSSYKNDNGPSSLSDSRKSSGGNSVNSLSFDKLILSWDPTDPDEWTMHRVTSWFKFHDFPESWILFFKKHQLFGHRFIKLLAYDNFAVYEKYLPQTKTASYTRFQQLLKKTMTKNVTNSHIRQKSASKLKSSRSSSESIKSKLKNSKSQEDISNSRSTSESALSPTKSGPSKTDEKNFLHSTSTHQKTKSASSLYRRSFISLRGSSSSNASSAKSPSNIKLSIPARPHSIIESNSTLTKSASPPASPSYPSIFRRHHKSSSSESSLLNSLFGSGIGEEAPTKPNPQGHSLSSENLAKGKSKHYETNVSSPLKQSSLPTSDDKGNLWNKFKRKSQIGVPSPNTVAYVTSQETPSLKSNSSTATLTVQTADVNIPSPSSSPPPIPKTANRSLEVISTEDTPKISSTTASFKETYPDCINPDKTVPVPVNNQKYSVKNFLLDQKFYPLKKTGLNDSENKYILVTKDNVSFVPLNLKSVAKLSSFKESALTKLGINHKNVTFHMTDFDCDIGAAIPDDTLEFLKKSLFLNTSGKIYIKDQMKLQQKPKPAPLTSENNVPLKSVKSKSSMRSGTSSLIASTDDVSIVTSSSDITSFDEHASGSGRRYPQTPSYYYDRVSNTNPTEELNYWNIKEVLSHEENAPKMVFKTSPKLELNLPDKGSKLNIPTPITENESKSSFQVLRKDEGTEIDFNHRRESPYTKPELAPKREAPKPPANTSPQRTLSTSKQNKPIRLVRASTKISRSKRSKPLPPQLLSSPIEASSSSPDSLTSSYTPASTHVLIPQPYKGANDVMRRLKTDQDSTSTSPSLKMKQKVNRSNSTVSTSNSIFYSPSPLLKRGNSKRVVSSTSAADIFEENDITFADAPPMFDSDDSDDDSSSSDDIIWSKKKTAPETNNENKKDEKSDNSSTHSDEIFYDSQTQDKMERKMTFRPSPEVVYQNLEKFFPRANLDKPITEGIASPTSPKSLDSLLSPKNVASSRTEPSTPSRPVPPDSSYEFIQDGLNGKNKPLNQAKTPKRTKTIRTIAHEASLARKNSVKLKRQNTKMWGTRMVEVTENHMVSINKAKNSKGEYKEFAWMKGEMIGKGSFGAVYLCLNVTTGEMMAVKQVEVPKYSSQNEAILSTVEALRSEVSTLKDLDHLNIVQYLGFENKNNIYSLFLEYVAGGSVGSLIRMYGRFDEPLIKHLTTQVLKGLAYLHSKGILHRDMKADNLLLDQDGICKISDFGISRKSKDIYSNSDMTMRGTVFWMAPEMVDTKQGYSAKVDIWSLGCIVLEMFAGKRPWSNLEVVAAMFKIGKSKSAPPIPEDTLPLISQIGRNFLDACFEINPEKRPTANELLSHPFSEVNETFNFKSTRLAKFIKSNDKLNSSKLRITSQENKTE

SEQ ID NO: 53 - DNA, 1251 bp, Saccharomyces cerevisiae
atggtatcttctttgcccaaggaatcgcaagccgaattgcaactgttccagaacgaaatcaacgccgctaatccgtccgactttcttcagttctccgccaactatttcaataaaaggctggaacaacagagagcgttcctcaaggccagggagcctgaatttaaggcaaagaacattgttctatttccggaaccagaggagtcattttccagacctcaatcagctcaatctcaatcaagatccagatcgagtgttatgttcaaatccccctttgtgaacgaggacccacactccaacgtgtttaaaagtgggtttaatttagacccgcacgaacaggacactcaccagcaagcacaggaagaacaacagcatactagagaaaagacatcaactcctccactcccaatgcacttcaacgcccaaaggcgtacttctgttagtggtgagaccttacaaccaaacaattttgacgattggactccagatcactataaggaaaagtccgagcagcaattgcaaagactggaaaaatcgatccgtaataactttctgttcaacaagctggattccgactcaaaaaggctggtcataaattgtctggaggagaagtccgtccccaaaggtgctacgataatcaagcaaggtgaccaaggggactacttctatgtcgtcgaaaagggtactgttgacttctacgtcaacgacaacaaggtcaactcttccgggccaggctccagtttcggggaacttgctcttatgtacaacagccctcgtgctgccaccgttgtagcaacctccgactgtttgttgtgggctctagacaggctcaccttcagaaaaatacttttgggcagctctttcaagaagagactcatgtatgacgatcttttgaagagcatgccagttttgaagagtttgactacgtacgaccgtgccaaacttgccgatgcactggataccaagatctaccagccgggtgaaacaatcattcgcgagggtgatcaaggggagaacttttatttaattgagtacggagctgtggacgtctctaagaagggccaaggtgtcataaataaactgaaagaccatgattatttcggtgaagtggccttgctaaacgatttgcccagacaggccactgtgactgctacaaagagaaccaaagttgccacattggggaaaagtggttttcaacgtttactgggtcctgcagtagacgtattaaagctcaatgatcctacaagacattaa

SEQ ID NO: 54 - protein, 416 aa, Saccharomyces cerevisiae
MVSSLPKESQAELQLFQNEINAANPSDFLQFSANYFNKRLEQQRAFLKAREPEFKAKNIVLFPEPEESFSRPQSAQSQSRSRSSVMFKSPFVNEDPHSNVFKSGFNLDPHEQDTHQQAQEEQQHTREKTSTPPLPMHFNAQRRTSVSGETLQPNNFDDWTPDHYKEKSEQQLQRLEKSIRNNFLFNKLDSDSKRLVINCLEEKSVPKGATIIKQGDQGDYFYVVEKGTVDFYVNDNKVNSSGPGSSFGELALMYNSPRAATVVATSDCLLWALDRLTFRKILLGSSFKKRLMYDDLLKSMPVLKSLTTYDRAKLADALDTKIYQPGETIIREGDQGENFYLIEYGAVDVSKKGQGVINKLKDHDYFGEVALLNDLPRQATVTATKRTKVATLGKSGFQRLLGPAVDVLKLNDPTRH

SEQ ID NO: 55 - DNA, 6504 bp, Saccharomyces cerevisiae
atgaaaggtcttctctggtctaagaacaggaaatcttcaacggccagtgctagttcaagctcaacttccacgtctcataagacaactactgcgtctacagcatcgtcgtcgtcgccgtcatcatcctctcaaactattcgaaactcgacaagcggtgcttctccatacatgcattcccaccatcaccatggccagggacacagtcaccacagaggggaagacaacaacagagataagagaaaaagctccgtatttccaccctccaagcagtacacatccactagttccagtcaggtgaacttggggatgtatcattcggatactaacaccagatcttctagaagcatagcctctacgctaaaagacgattctccgtctgtctgctccgaagatgaaataagcaattcttctagccagaagtccaatgcccaggatgagactcccattgcgtacaagaagagtgcccattcgaaagactcattgttgccttcacgttcctcgtctttatcacctcctcagtctcgatgtagcactggaactacgctagagaaatcgttgaacacttcaggtatcagtaacagtagcggcactaataataacaatagcaataataacaacgataacgagcaaaagcaaagaaatgttatccacttaaactctgaaaactatgatacaactgtttttaagactggatgggttaataagtcccatggccagactgttgctacaaactataatagctcaatgacagccccttcctcttcctcttcgtcctcctctcagaatctccgtaatgatgcgtattctagaaacagggaaagcaggttttatgggaacgacggttcgtctttaaaaaatgatgacagcagtagtactacggccactaacagtggcaatgatgtggcctcagcaagaagcagcatggctatagatcctcaaatgctagtacctgattaccgtctttatagggctcaattgaaaggttgcgttctcaacctttacaaaagtggtttgaatagtaacattaagttttttgatccaactttaccagcttcaaatagtagtatagcaaatgaaaaccatcaacagaaaaaacaacaaacaaacaaccaagcacaagcggaagctctgcaccaaaagcaatcatttggccaaatgggtgaacctattacactggacctgaagtatttatctgaagtttacccgcacccagatttaagacaagacagtgatggtaaaattatatcaggcacaatagaaagtttatgtcacacagtcttattttaccccggtccaaagcaatcggacgtacctaatgagaaatcattatctaagacacatagagctgttattaatctgttattgatgtttccattactagatcatttcattaagtttctaaaggtattcaaccaattcggtctttcttttaccaagaataaatcaagattgacaaataattccacacaattctacaacatatcccctgctgtcgatgactccatgactcaaagattagctttaactgctaaaacaatccttgatgtatttccgggatttttgctggatgaaccaatgctgaagactataatttccttattagatactatatctttgcataacgatgaaatttccaacaatttgaaaattaaaatcgccaataaacataacgaattaatgaaacttaccgcattcactcgatctcttccaatggcaacatcatctacacatgaattagagattatattggatccaagtcatttcctgtctttagacattacaacattggctgatgaagttcatcatatcaatttaaagtttgataaagtatgggcaccgaaatttgactattctctgctgtatgattcgaagtttattaatcgaagaattgtctcgttaaatccattggtattcaacaacgaccaaaatatccattttcttggaaggctactaatatcacatttatttccaacaaatcctgagtttagtaaaaaagtgactccaaaagtgagagctgagttattagataaatgggtccaaattggctgtagatttgaacatttaggagacatggtatcatggctagctgtcgccactatcatttgttcaattcctgtactaaggtcatcttcatggaaatatgttcctgatcagtcattgaaaactatttttaaagattgggttcctaccattattcagttagagaggcgacaaaggacatctaaatctacaagtagtgttttcatactcgctcctccaaatctggatgacgactttacgagagctaacgtgatttcttattttggcgatttattaattcatgctgatgatttaccatctgatacgaaattcaagtacttggaaaagaaaattaacagaacaaaaaacgcttttcataaatggcaacaaagattacaagcaatcgactctacgagacataaaactaattcgacagaaaacgtcagggataatgattctcctaataacgttgtttatcagctctggaaatttcatttatcacaacctccgttgaacattgaaggaataatgaaattaagtgtccaacacgaacctccaataatcgaccagaaagcgtattctactattggttctcaaaggagtgctttagtaactggaagttatttacccattttattcaatgaactattcccaaattattcactatttcctaagaatacattagtgggtgctgccagtgatgcgaagttgccgcctccaagatcatccgcgcgcctctcaaaatcactttcaatcagtgaaccaattccaatagcttcaaacagtcacactatgggctcattaacagatgatgctatgtcctcaaaaaatgataataataaagttacaggtgttggaaaaattgacggacctgtgatcaaagagatgtcgtcaaaacaatcaaataaacagagactattaaaatctgtgagagatgtttttaatattgacatggatgtgtttcatatatcagatgagttagtatttaaatcggtatacgataatgatggtaaatcccgtcctgctagtatggtcatagaaacaccaaagagattctcacaacactcttccatgcttattaataatccagctactccaaaccaaaagatgagagattccttggataccactggaagactaagtaagacattagaaaatatggactttttcaacaatattggtcaagtatcagattcactaaaagaatcgattattcgtgtcgtattgaaatcgtcgtcgctagaaaagatttttgatttactggtattaacttcaaatatcttttcaaaattggtagacactaaagaccttgagaattattactatcatcaaagacaaaggggtcattctaccagagggctttccgatgataacataggactactagattatgcattcgttaaactaactatggacaatgatattttcacagaaacattcttcaacacttataaaagctttactactacaactacggtattagaaaatatggcaaaacggtatgttggtgcaaagagttgcagcgtgtcaatttccaagattttagatcgcagtgatgattctaaaatgaagataaatgaggatacaaatttagtgtcctcttcattatacgaccaaaattttcctgtttgggatatgaaagtaactgacgatgaaaacataaaccttatttatatggcaaaaatccaaatcggcgccgcggaagctatactacatttagtgaaaaatcattactctgactttactgacgatttatgtaacaactctactctattggatattataaaaataatggaacaagaagtatccactgaatggcctacgcgaattgcaaactcaaagttacaaaaaagcctaccagaaaattttgtgattgaaacagaaaatttgttgactacgttaactgatctatttcatggtattaaatcagcataccaaaagcaactatacagacctattggtgtcaatagaactcagaagagaataactgacattttgaattcctttaacacattctcttttacagatcttaacaacatcattgatgatccttcctttagcgatgacatgattagatcttttcaaaagttacactcaaccaattacgaagatatactagaatggatctaccagttagataactttatttctaagaagttcaatttagtttctaagaaagattggatagttcttttccaggagttggaattgctttcaaaggaatctctggtctcttttttcaattatccgctacattttaagtcaagcaaattgataaaccccggatatttgcaattgcacgagtttgaaatttccaatctttttacttggatttctacattgattcttaaggatgataatggtacggagagtcttttttttgaaaaactaccacaatctataaaattgttaataaagttacacacgagtctaactacgtttttcgtgatggaaatttcaaacgtcaacaaaagcagtagtgaaaggttaactacttgtaaagttatattacaaattttgaactacatccgctggaaaaacggaagtttggatttatttgattcagaggaggatgaaagtcctcatgctatttgtccacacattccagcttttattgaaactgctattgcgcatgccataatatcaccagagtctagaaactatgaactttcgtggatcaaagcttctgaaaaactttcggaccctactaaaggaacccaaaatctaagatcgattagtaacgttttagagaagatagatgacatacatataaagagattcattgagattgatgatgtattcagcaaaaactgcaagaatttatgcccctgccctggttggttcatttcaaggttactagaaatatctcagtttgtccctaacatgagtatcactaattcgaaacttattaattttgacaaaaggagatttgttaacaacataatatctaatgtcttggatttaattccgaacgaaagggagtttccacttgatattgaaatgagtgacgaaaatccttcgaaaagaactacatttggccgcattctgttcaataattttgaagatgttaataaagtatacagaaagaagactaaaaaagtatcagaatcagaagccatatcggagagatttcaagagcagggagtatttaatgaaatactagtcaatgaaattgaaaaaataaagagggaagccagaaaattagaggttttactcgatcaagaaaagatcttgaagaactctgctgctttacatcaggccgttccgaaaaagaataggaagtctgttattatctcaggtactcatagtgacaacgatcatagctataatatcaataagaacaccggtcaaacgccttctctaggtagtgttatggaaagcaataattcagcaaggaatagaagagattcaagggcctccttttccacaaatagatcatcagtagtgtcaaattccagccataatggtgttagtaaaaaaataggtggatttttcagaagaccattttcaatcggtggattcaacacatccagttctaattattcactcaacagtatattatcgcaagaagtttcaagtaacaaatccattctaccaagtatacttccagaggttgattccatgcaactacacgacttaaaacctagttatagtttgaagacctttgaaatcaagtcaataatggaaataatcaatcacagaaacattccggcttactactatgcgttcaagatagttatgcaaaatggccatgaatatctgattcaaacggctagttctagtgacctcacagaatggataaaaatgatcaaggcttccaagagattttcattccattcgaaaaaatataaaggtaaaactcataataagatatttggggtaccattagaagacgtttgtgaaagagagaataccttgatacctacaattgttgtgaaattgctggaagagattgagctgcgtgggctagatgaagtgggattgtacagaattcctggttccatcggcagtataaatgcactaaagaacgcatttgacgaagaaggtgcaacagataattcctttacattagaggacgatagatggtttgaagtgaatgcgatcgcaggctgttttaagatgtatttaagagagttaccagattctttattttctcatgctatggtgaacgactttaccgatttggcgattaagtataaagcacatgcaatggtaaatgaagaatacaagagaatgatgaatgagttactccaaaagttacctacatgctattaccaaactttgaaaagaattgtatttcatttgaataaagtacatcagcatgttgtaaataataaaatggacgcatcaaacttggctattgtattttccatgagttttataaaccaagaagacttagccaacagcatggggtccagattaggtgcagttcagacaatcctgcaagattttattaagaatccaaatgattatttcaagcaataa

SEQ ID NO: 56 - protein, 2167 aa, Saccharomyces cerevisiae
MKGLLWSKNRKSSTASASSSSTSTSHKTTTASTASSSSPSSSSQTIRNSTSGASPYMHSHHHHGQGHSHHRGEDNNRDKRKSSVFPPSKQYTSTSSSQVNLGMYHSDTNTRSSRSIASTLKDDSPSVCSEDEISNSSSQKSNAQDETPIAYKKSAHSKDSLLPSRSSSLSPPQSRCSTGTTLEKSLNTSGISNSSGTNNNNSNNNNDNEQKQRNVIHLNSENYDTTVFKTGWVNKSHGQTVATNYNSSMTAPSSSSSSSSQNLRNDAYSRNRESRFYGNDGSSLKNDDSSSTTATNSGNDVASARSSMAIDPQMLVPDYRLYRAQLKGCVLNLYKSGLNSNIKFFDPTLPASNSSIANENHQQKKQQTNNQAQAEALHQKQSFGQMGEPITLDLKYLSEVYPHPDLRQDSDGKIISGTIESLCHTVLFYPGPKQSDVPNEKSLSKTHRAVINLLLMFPLLDHFIKFLKVFNQFGLSFTKNKSRLTNNSTQFYNISPAVDDSMTQRLALTAKTILDVFPGFLLDEPMLKTIISLLDTISLHNDEISNNLKIKIANKHNELMKLTAFTRSLPMATSSTHELEIILDPSHFLSLDITTLADEVHHINLKFDKVWAPKFDYSLLYDSKFINRRIVSLNPLVFNNDQNIHFLGRLLISHLFPTNPEFSKKVTPKVRAELLDKWVQIGCRFEHLGDMVSWLAVATIICSIPVLRSSSWKYVPDQSLKTIFKDWVPTIIQLERRQRTSKSTSSVFILAPPNLDDDFTRANVISYFGDLLIHADDLPSDTKFKYLEKKINRTKNAFHKWQQRLQAIDSTRHKTNSTENVRDNDSPNNVVYQLWKFHLSQPPLNIEGIMKLSVQHEPPIIDQKAYSTIGSQRSALVTGSYLPILFNELFPNYSLFPKNTLVGAASDAKLPPPRSSARLSKSLSISEPIPIASNSHTMGSLTDDAMSSKNDNNKVTGVGKIDGPVIKEMSSKQSNKQRLLKSVRDVFNIDMDVFHISDELVFKSVYDNDGKSRPASMVIETPKRFSQHSSMLINNPATPNQKMRDSLDTTGRLSKTLENMDFFNNIGQVSDSLKESIIRVVLKSSSLEKIFDLLVLTSNIFSKLVDTKDLENYYYHQRQRGHSTRGLSDDNIGLLDYAFVKLTMDNDIFTETFFNTYKSFTTTTTVLENMAKRYVGAKSCSVSISKILDRSDDSKMKINEDTNLVSSSLYDQNFPVWDMKVTDDENINLIYMAKIQIGAAEAILHLVKNHYSDFTDDLCNNSTLLDIIKIMEQEVSTEWPTRIANSKLQKSLPENFVIETENLLTTLTDLFHGIKSAYQKQLYRPIGVNRTQKRITDILNSFNTFSFTDLNNIIDDPSFSDDMIRSFQKLHSTNYEDILEWIYQLDNFISKKFNLVSKKDWIVLFQELELLSKESLVSFFNYPLHFKSSKLINPGYLQLHEFEISNLFTWISTLILKDDNGTESLFFEKLPQSIKLLIKLHTSLTTFFVMEISNVNKSSSERLTTCKVILQILNYIRWKNGSLDLFDSEEDESPHAICPHIPAFIETAIAHAIISPESRNYELSWIKASEKLSDPTKGTQNLRSISNVLEKIDDIHIKRFIEIDDVFSKNCKNLCPCPGWFISRLLEISQFVPNMSITNSKLINFDKRRFVNNIISNVLDLIPNEREFPLDIEMSDENPSKRTTFGRILFNNFEDVNKVYRKKTKKVSESEAISERFQEQGVFNEILVNEIEKIKREARKLEVLLDQEKILKNSAALHQAVPKKNRKSVIISGTHSDNDHSYNINKNTGQTPSLGSVMESNNSARNRRDSRASFSTNRSSVVSNSSHNGVSKKIGGFFRRPFSIGGFNTSSSNYSLNSILSQEVSSNKSILPSILPEVDSMQLHDLKPSYSLKTFEIKSIMEIINHRNIPAYYYAFKIVMQNGHEYLIQTASSSDLTEWIKMIKASKRFSFHSKKYKGKTHNKIFGVPLEDVCERENTLIPTIVVKLLEEIELRGLDEVGLYRIPGSIGSINALKNAFDEEGATDNSFTLEDDRWFEVNAIAGCFKMYLRELPDSLFSHAMVNDFTDLAIKYKAHAMVNEEYKRMMNELLQKLPTCYYQTLKRIVFHLNKVHQHVVNNKMDASNLAIVFSMSFINQEDLANSMGSRLGAVQTILQDFIKNPNDYFKQ

SEQ ID NO: 57 - DNA, 942 bp, Saccharomyces cerevisiae
atgcgtttctctactacactcgctactgcagctactgcgctatttttcacagcctcccaagtttcagctattggtgaactagcctttaacttgggtgtcaagaacaacgatggtacttgtaagtccacttccgactatgaaaccgaattacaagctttgaagagctacacttccaccgtcaaagtttacgctgcctcagattgtaacactttgcaaaacttaggtcctgctgctgaagctgagggatttactatctttgtcggtgtttggccaacagacgacagtcattacgctgctgaaaaggctgctttgcaaacctatttgccaaaaattaaagaatccactgttgctggtttcttggttggttctgaagccttataccgtaacgatttgactgcctctcaattatcagacaaaattaatgacgtccgtagtgtcgttgctgacatttccgattctgacggaaagtcatactctggtaagcaagtcggtactgtcgattcctggaatgttttggttgctggttacaattctgccgttatcgaagcttccgattttgttatggctaacgcgttctcctactggcaaggtcaaaccatgcaaaatgcctcttactcattctttgatgatattatgcaagctctacaggttatccaatctactaaaggttctaccgatattaccttctgggttggtgagaccggttggccaactgatggtaccaactttgaaagttcttacccatctgttgacaacgccaaacaattctggaaagaaggtatctgttccatgagagcttggggtgttaacgttattgtttttgaagcctttgatgaagattggaagccaaacacctctggtacctctgatgtcgagaagcactggggtgttttcacttcaagtgacaatttgaaatactccttggactgtgacttttcatga

SEQ ID NO: 58 - protein, 313 aa, Saccharomyces cerevisiae
MRFSTTLATAATALFFTASQVSAIGELAFNLGVKNNDGTCKSTSDYETELQALKSYTSTVKVYAASDCNTLQNLGPAAEAEGFTIFVGVWPTDDSHYAAEKAALQTYLPKIKESTVAGFLVGSEALYRNDLTASQLSDKINDVRSVVADISDSDGKSYSGKQVGTVDSWNVLVAGYNSAVIEASDFVMANAFSYWQGQTMQNASYSFFDDIMQALQVIQSTKGSTDITFWVGETGWPTDGTNFESSYPSVDNAKQFWKEGICSMRAWGVNVIVFEAFDEDWKPNTSGTSDVEKHWGVFTSSDNLKYSLDCDFS

SEQ ID NO: 59 - DNA, 4302 bp, Saccharomyces cerevisiae
atggcaaataataattctgatcgacaaggtttggaacccagagtcattagaactctgggttcacaagcgcttagcggtcctagcatatctaatagaacttcaagttcggaggcaaaccctcatttttccaagaacgtgaaggaagcaatgatcaagacagcttctccgactcctttatctacacctatttacaggatagctcaagcttgtgacaggtgtcgatctaagaaaacaaggtgcgatggaaaaagaccacagtgttcgcagtgtgctgctgtcggatttgaatgcagaataagcgataaattactgaggaaagcgtatccaaaagggtacacagaaagcctggaagaaagagtacgcgaactggaggcagagaataagcgtttgctagctttgtgtgatatcaaagaacagcaaataagccttgtttcacagtcgcgaccacagacatcaacggataataccataaatggcaatttcaaacatgatttgaaagatgctccattgaatctgtcttctacaaatatctatttattaaatcaaacggttaataagcagctacaaaatggcaaaatggatggtgataatagcggttctgcaatgagtccattgggggcaccacctccaccgccacacaaagaccatctttgtgacggcgtttcctgtacaaatcatttacacgtcaagcctacttctacgagtttaaacgatccaaccgctatatcttttgaacaggacgaggcacctggtcttcctgcggtaaaggcattaaaatcaatgacgactcatcaacgtagcactcaattggcaactttagtttctttatccatcccaagatctactgaagaaattctgtttattcctcagcttttaactaggataagacaaatatttggtttcaactcaaagcaatgtttgtatacggtttcattattatcttcattgaaaaatagattgccagcaccacggcttctagcaccttcaacatcaaccaagttaaaggagaaagatgaagataaaaaacttgatgatgattcggcttttgtgaaaaggtttcaaagcacaaacctctccgagtttgtcgatttgaaaaagtttttaatttctttgaaatttaacattaactcgttttcaaagcaatcagaaaagccggctaatgatcaggatgatgaactactttccctcactgaaattaaagagcttttacacctttttttcaaattttggtctaatcaggtaccaattctaaacaatgaccacttcttaatatatttcaacaattttgttgaagtcgtgaagcatttatctacagaaaatttggagacgaataacactactaaaagtacagtcaccactaatcatgaaatatttgccctaaagcttctgatgatgttacaaatggggttactcgttaagattaaaatggaaaaaataaaatacactgtaccgaagaatccgaaggccaaatatgctagattgatggcatattatcatcagctttccctaataattcctaaaaatccttattttttaaatatgtccacaacttcattaccatccttacaattgttatctttggcatccttttattatttaaacgtgggtgatatttcggcaatctatggggtaagaggccgtattgtttctatggcacaacaattgagacttcacagatgtcctagtgccgtattaagtgtacactctaacccagttctacaaaaatttgagcaaagcgagaggagattactgttttgggcaatttattacgttgacgtttttgcctcattgcaacttggtgttcctcgtttacttaaggattttgatattgaatgtgcattaccaatttctgatgttgagtataaggatcagttatctatggaaaatgaaaaagcagataaaaaagctaaaaagattcaactgcaaggtcaagtttcaagcttttcattgcagataatcagatttgcgaaaatattaggtaacattctagactcgatttttaagagaggaatgatggatgaacgtataacttctgaagttgcattagtacatgaaaacgcactggataactggagaaatcaacttcccgaaatgtactactttcaaataactgtaaacggaactgtgaatttagacgagattagagcaaccaatcaaagaaatactgagaccaaatttgataagaaagacataatattatttgaaaagaagattctattgctgttttatttcttggccaaatctatgatacatttaccggttattgcaaccaaacctttgcctaagaatgttgataatgccacaaagaagaaacagtcaatgttcaacaacgactctaaaggcgcaaccaaccaggaccacatgatattagatgttgatatgacttctcctgctataaggacatcatcctcatatatcattttacaacaagctaccaatgcaacgcttacgattttccaggccattaattccatgtatttacctttgccattgaatgtatcaagaacgttaatcagattttctttgctctgtgctagaggttctttggaatataccaaaggtggtgcgttattcttagataataaaaatcttctcctcgacaccatcaaagatatcgaaaacgataggcttttggatttacctggaattgcctcttggcacacgctgaaactgtttgacatgagcatcaacctgttgttgaaagcacctaatgttaaggttgaaagactggataaattcttggaaaagaaattgaattactacaatagattgatggggttaccaccggccacaaccacatccttaaaaccattatttggctctcaatcgaagaacagcctggaaaatagacaaagaacacctaatgtcaaaagagaaaacccagaacacgagtatctttatggaaacgatagtaataataacaataattctgaagcgggtcactctccaatgacaaatacaactaatggtaataagagattaaagtatgaaaaagatgcaaaacgaaatgcaaaagatggcggtatatccaagggggagaacgcacataatttccagaatgataccaaaaaaaacatgtccaccagcaatctgtttccattttcgtttagtaatacagaccttactgcgctgttcacccatcctgaaggaccgaattgtacgaatactaataatggcaacgtggatgtgtgtaacagagcttctacagatgccacggatgccaatatagagaacttaagctttttaaatatggcaccattcttacagaccggtaactccaatataggtcaaaacacgattgagaataagcctatgcacatggatgcgatattcagtctaccaagtaatttagatctaatgaaggataatatggactctaaaccggaacaattagaacccgttattaagcaaaaccctgagaattcaaaaaacaaccaatttcatcagaaaggaaaaagtacgaatatggaaaagaataatctctctttcaacaacaagagtaactacagcctaacaaagctaatgagattgctgaacaacgataattctttctcgaatattagtattaacaactttttataccaaaatgatcagaactccgcgtcagcggatccgggaacaaataaaaaagccgttacaaatgcaggtgccaacttcaaaccaccttcaactggcagtaataccagccaaggcagtatccttggaagtacaaagcatggaatggacaactgtgatttcaacgatttaggtaattttaacaatttcatgacaaatgtcaattattctggggtcgactatgattacattgtagatgcatcacttgggttggctcctttattagtggatacgcccgatatctcaaataccaacacgacgtctactacgtcaaatcgaagtaaaaacagcatcatcctagatacgacatttaacgatgacttggatcggtcacgcatgaatgccagagaagtattgaatcctaccgactcaattttaagtcaagggatggtatcctccgtaagtacgagaaataccagcaatcaaagatctctttcatcgggcaatgattcaaaaggtgacagtagttctcaagagaactcaaagagtgcaactggcaaccagttggatacaccttctacactgtttcaaatgagaaggacctcttcagggccctcggcgtcccaccgtggtccaagacggcctcagaaaaatcgttacaatacagatcgatcaaaaagttctggtggcggaagttccaacacagataatgtatctgatttattccaatggcaaaacgccaaataa

SEQ ID NO: 60 - protein, 1433 aa, Saccharomyces cerevisiae
MANNNSDRQGLEPRVIRTLGSQALSGPSISNRTSSSEANPHFSKNVKEAMIKTASPTPLSTPIYRIAQACDRCRSKKTRCDGKRPQCSQCAAVGFECRISDKLLRKAYPKGYTESLEERVRELEAENKRLLALCDIKEQQISLVSQSRPQTSTDNTINGNFKHDLKDAPLNLSSTNIYLLNQTVNKQLQNGKMDGDNSGSAMSPLGAPPPPPHKDHLCDGVSCTNHLHVKPTSTSLNDPTAISFEQDEAPGLPAVKALKSMTTHQRSTQLATLVSLSIPRSTEEILFIPQLLTRIRQIFGFNSKQCLYTVSLLSSLKNRLPAPRLLAPSTSTKLKEKDEDKKLDDDSAFVKRFQSTNLSEFVDLKKFLISLKFNINSFSKQSEKPANDQDDELLSLTEIKELLHLFFKFWSNQVPILNNDHFLIYFNNFVEVVKHLSTENLETNNTTKSTVTTNHEIFALKLLMMLQMGLLVKIKMEKIKYTVPKNPKAKYARLMAYYHQLSLIIPKNPYFLNMSTTSLPSLQLLSLASFYYLNVGDISAIYGVRGRIVSMAQQLRLHRCPSAVLSVHSNPVLQKFEQSERRLLFWAIYYVDVFASLQLGVPRLLKDFDIECALPISDVEYKDQLSMENEKADKKAKKIQLQGQVSSFSLQIIRFAKILGNILDSIFKRGMMDERITSEVALVHENALDNWRNQLPEMYYFQITVNGTVNLDEIRATNQRNTETKFDKKDIILFEKKILLLFYFLAKSMIHLPVIATKPLPKNVDNATKKKQSMFNNDSKGATNQDHMILDVDMTSPAIRTSSSYIILQQATNATLTIFQAINSMYLPLPLNVSRTLIRFSLLCARGSLEYTKGGALFLDNKNLLLDTIKDIENDRLLDLPGIASWHTLKLFDMSINLLLKAPNVKVERLDKFLEKKLNYYNRLMGLPPATTTSLKPLFGSQSKNSLENRQRTPNVKRENPEHEYLYGNDSNNNNNSEAGHSPMTNTTNGNKRLKYEKDAKRNAKDGGISKGENAHNFQNDTKKNMSTSNLFPFSFSNTDLTALFTHPEGPNCTNTNNGNVDVCNRASTDATDANIENLSFLNMAPFLQTGNSNIGQNTIENKPMHMDAIFSLPSNLDLMKDNMDSKPEQLEPVIKQNPENSKNNQFHQKGKSTNMEKNNLSFNNKSNYSLTKLMRLLNNDNSFSNISINNFLYQNDQNSASADPGTNKKAVTNAGANFKPPSTGSNTSQGSILGSTKHGMDNCDFNDLGNFNNFMTNVNYSGVDYDYIVDASLGLAPLLVDTPDISNTNTTSTTSNRSKNSIILDTTFNDDLDRSRMNAREVLNPTDSILSQGMVSSVSTRNTSNQRSLSSGNDSKGDSSSQENSKSATGNQLDTPSTLFQMRRTSSGPSASHRGPRRPQKNRYNTDRSKSSGGGSSNTDNVSDLFQWQNAK

SEQ ID NO: 61 - DNA, 2565 bp, Saccharomyces cerevisiae
atggcgatccaaacccgttttgcctcgggcacatctttatccgatttgaaaccaaaaccaagtgcaacttccatctccatacccatgcaaaatgtcatgaacaagcctgtcacggaacaggactcactgttccatatatgcgcaaacatccggaaaagactggaggtgttacctcaactcaaaccttttttacaattggcctaccaatcgagcgaggttttgagtgaaaggcaatctcttttgctatcccaaaagcagcatcaggaactgctcaagtccaatggcgctaaccgggacagtagcgacttggcaccaactttaaggtctagctctatctccacagctaccagtctcatgtcgatggaaggtatatcatacacgaattcgaatccctcggccaccccaaatatggaggacactttactgacttttagtatgggtattttgcccattaccatggattgcgaccctgtgacacaactatcacagctgtttcaacaaggtgcgcccctctgtatacttttcaactctgtgaagccgcaatttaaattaccggtaatagcatctgacgatttgaaagtctgtaaaaaatccatttatgactttatattgggctgcaagaaacactttgcatttaacgatgaggagcttttcactatatccgacgtttttgccaactctacttcccagctggtcaaagtgctagaagtagtagaaacgctaatgaattccagccctactattttcccctctaagagtaagacacagcaaatcatgaacgcagaaaaccaacaccgacatcagcctcagcagtcttcgaagaagcataacgagtatgttaaaattatcaaggaattcgttgcaacggaaagaaaatatgttcacgatttggaaattttggataaatatagacagcagttattagacagcaatctaataacgtctgaagagttgtacatgttgttccctaatttgggtgatgctatagattttcaaagaagatttctaatatccttggaaataaatgctttagtagaaccttccaagcaaagaatcggggctcttttcatgcattccaaacatttttttaagttgtatgagccttggtctattggccaaaatgcagccatcgaatttctctcttcaactttgcacaagatgagggttgatgaatcgcagcggttcataattaacaataaactggaattgcaatccttcctttataaacccgtgcaaaggctttgtagatatcccctgttggtcaaagaattgcttgctgaatcgagtgacgataataatacgaaagaacttgaagctgctttagatatttctaaaaatattgcgagaagtatcaacgaaaatcaaagaagaacagaaaatcatcaagtggtgaagaaactttatggtagagtggtcaactggaagggttatagaatttccaagttcggtgagttattatatttcgataaagtgttcatttcaacaacaaatagctcctcggaacctgaaagagaatttgaggtttatctttttgaaaaaatcatcatccttttttcagaggtagtgactaagaaatctgcatcatcactaatccttaagaagaaatcctcaacctcagcatcaatctccgcctcgaacataacggacaacaatggcagccctcaccacagttaccataagaggcatagcaatagtagtagcagtaataatatccatttatcttcgtcttcagcagcggcgataatacattccagtaccaatagtagtgacaacaattccaacaattcatcatcatcctcattattcaagctgtccgctaacgaacctaagctggatctaagaggtcgaattatgataatgaatctgaatcaaatcataccgcaaaacaaccggtcattaaatataacatgggaatccataaaagagcaaggtaatttccttttgaaattcaaaaatgaggaaacaagagataattggtcatcgtgtttacaacagttgattcatgatctgaaaaatgagcagtttaaggcaagacatcactcttcaacatcgacgacttcatcgacagccaaatcatcttcaatgatgtcacccaccacaactatgaatacaccgaatcatcacaacagccgccagacacacgatagtatggcttctttctcaagttctcatatgaaaagggtttcggatgtcctgcctaaacggaggaccacttcatcaagtttcgaaagtgaaattaaatccatttcagaaaatttcaagaactctattccagaatcttccatactcttcaggatatcatataataacaactctaataatacctctagtagcgagatcttcacacttttggtagaaaaagtttggaattttgacgacttgataatggcgatcaattctaaaatttcgaatacacataataacaacatttcaccaatcaccaagatcaaatatcaggacgaagatggggattttgttgtgttaggtagcgatgaagattggaatgttgctaaagaaatgttggcggaaaacaatgagaaattcttgaacattcgtctgtattga

SEQ ID NO: 62 - protein, 854 aa, Saccharomyces cerevisiae
MAIQTRFASGTSLSDLKPKPSATSISIPMQNVMNKPVTEQDSLFHICANIRKRLEVLPQLKPFLQLAYQSSEVLSERQSLLLSQKQHQELLKSNGANRDSSDLAPTLRSSSISTATSLMSMEGISYTNSNPSATPNMEDTLLTFSMGILPITMDCDPVTQLSQLFQQGAPLCILFNSVKPQFKLPVIASDDLKVCKKSIYDFILGCKKHFAFNDEELFTISDVFANSTSQLVKVLEVVETLMNSSPTIFPSKSKTQQIMNAENQHRHQPQQSSKKHNEYVKIIKEFVATERKYVHDLEILDKYRQQLLDSNLITSEELYMLFPNLGDAIDFQRRFLISLEINALVEPSKQRIGALFMHSKHFFKLYEPWSIGQNAAIEFLSSTLHKMRVDESQRFIINNKLELQSFLYKPVQRLCRYPLLVKELLAESSDDNNTKELEAALDISKNIARSINENQRRTENHQVVKKLYGRVVNWKGYRISKFGELLYFDKVFISTTNSSSEPEREFEVYLFEKIIILFSEVVTKKSASSLILKKKSSTSASISASNITDNNGSPHHSYHKRHSNSSSSNNIHLSSSSAAAIIHSSTNSSDNNSNNSSSSSLFKLSANEPKLDLRGRIMIMNLNQIIPQNNRSLNITWESIKEQGNFLLKFKNEETRDNWSSCLQQLIHDLKNEQFKARHHSSTSTTSSTAKSSSMMSPTTTMNTPNHHNSRQTHDSMASFSSSHMKRVSDVLPKRRTTSSSFESEIKSISENFKNSIPESSILFRISYNNNSNNTSSSEIFTLLVEKVWNFDDLIMAINSKISNTHNNNISPITKIKYQDEDGDFVVLGSDEDWNVAKEMLAENNEKFLNIRLY

SEQ ID NO: 63 - DNA, 4770 bp, Saccharomyces cerevisiae
atgtccgatactaacacgtctattcccaatacaagttctgcaagggaggcaggcaatgcttcacaaactccatcgatcagctcttcatctaacacttccactaccactaacacagaatcatcctcagcttctctttcttcttccccctcgacaagtgagttgaccagcattcgtccaattggaatagtagtcgctgcttatgactttaattatcccattaaaaaagacagttcttcgcaacttttgtctgtacaacaaggggaaaccatttatatacttaacaaaaactcatctgggtggtgggatggattagttattgacgacagtaatgggaaagttaacagaggctggtttcctcaaaacttcggtagacctttaagagacagtcatctcagaaagcacagtcatccgatgaaaaaatatagttccagtaagagctcaaggcgcagcagcttaaatagcttgggcaatagtgcatatttacatgtgcctagaaatccgagcaagagcaggagggggagttctactttatcagcgtctttatcaaatgcccacaatgcagaaacaagttccggccacaataacaccgtatcgatgaataattctcccttttcagcgccaaacgatgcttcccacataacccctcaatcttcgaactttaattccaatgctagtctatcccaggatatgacaaagagtgcagatggctcatctgagatgaatacaaacgcaattatgaataacaatgaaacaaatttacaaacttctggtgagaaagcaggtcccccactagtagcagaagaaacaattaagatattaccgttggaagagatagaaatgattattaatggtatacgttcgaacattgcttcgacttggtcccccataccactgataacgaaaacatccgattacaagttggtatactataacaaagaccttgatatatactgttcagaattacccttgatttctaactcaattatggaatccgatgacatttgtgacagcgaaccaaaattcccgcccaatgatcatcttgttaacctatatactagagatctgaggaaaaatgcgaatattgaggacagttctacgagatcgaagcaatcggaaagtgaacaaaatagatcaagccttctaatggaaaaacaggattcaaaagaaactgatggaaataataacagtattaatgatgatgataataataacgaaaataacaaaaacgaattcaatgaggctggtccttcatcattaaattctttatctgctccagatttaacgcagaatattcaatcaagggtagttgccccaagtcgctcttctatactggccaagagtgacatcttttatcactattcaagagatataaaattgtggacagaattacaagacctaacagtttattatactaaaacggctcacaagatgttccttaaagagaatcgtctcaatttcacgaaatactttgatttgatatcagattcaatagtcttcacacagttaggctgcaggctaatgcaacatgaaattaaagccaaaagttgcagcaaggagattaagaagattttcaaaggtctaatctcttcattgtcaaggataagtatcaattctcatttatatttcgattcagcttttcacagaaaaaaaatggatactatgaatgacaaggataacgataatcaggaaaataattgttctaggacggaaggggatgatggtaaaattgaagtagatagtgtacatgatctagtttcagttccattgtccggtaaacgtaatgtaagtaccagtacaacggatacattgactccaatgagatcatcattcagtacagtcaatgagaacgatatggaaaatttctcagtcttaggtccaagaaatagtgttaattctgtcgtaacaccaaggacttcaatacaaaattctactttggaagatttttcaccgtccaacaaaaattttaagtcagctaaatcgatttacgaaatggttgatgtggaattctcgaaatttttaaggcatgttcagttactttattttgtgttacagagctcagtcttctcagatgataatactttaccacagttgctcccaagattttttaaaggttcatttagcggtggttcttggacaaatccattttcgacttttattacggatgaatttggtaatgcgacaaagaacaaagctgtcacatctaatgaagtgaccgcttcgtcgtccaaaaattcctcaatatcaaggattccaccaaagatggcagatgctattgcctctgcgtcaggatatagcgctaattcagaaacaaattcccaaattgatttaaaagcaagcagtgccgcgtctggttcagtttttacacctttcaaccgtccttctcataacagaaccttttcaagagcaagagtttcaaaaaggaagaaaaaatatccattaactgtagacactttgaatacaatgaagaagaaatcctcgcaaatttttgaaaaattaaataatgctacaggtgaacacttaaaaattataagtaaacccaaaagcagaattaggaatttggaaataaattcaagcacatacgaacaaataaatcagaatgttttactattggagatactggagaatttagatctgtcaattttcatcaatttgaaaaacctgattaagacacccagtattttgttggatttggaaagcgaggaatttttagttcacgccatgtcttcggtctcctcagtactaacagagttttttgatataaagcaggcttttcatgacatcgtcatcagattaataatgacaacgcaacaaacgaccttagacgacccgtatttgttttcctcaatgaggtccaatttccctgtcggacatcatgaacctttcaagaatatctctaatacacctttggtcaagggccccttccataaaaaaaatgaacaattggcactctccttatttcacgtattggtgagtcaagatgtggagttcaataaccttgaatttttaaacaactccgacgattttaaagatgcttgtgaaaagtatgtcgagatttctaatcttgcgtgtattattgttgatcaattgattgaagaaagagaaaatttgctgaactacgcagcaagaatgatgaagaataatttgactgcagaactattgaaaggtgagcaagaaaaatggtttgatatttattccgaggactatagtgatgacgattcagaaaatgatgaagctatcatcgatgacgaattaggatctgaggactatattgaacgcaaagctgcgaacatagagaaaaaccttccatggtttttaacttcagattatgaaactagtcttgtctatgactcaagaggaaaaattcgtggcgggacaaaagaggcactgattgaacatttaaccagtcatgaacttgttgatgcggctttcaatgttacaatgttaataactttcagaagtatattaaccacaagagagtttttttatgccctgatttacaggtacaacttgtatcctcctgaagggctgagttacgatgattacaatatttggatagaaaaaaagtcaaacccgattaaatgccgtgtggtcaacattatgagaacatttttgacgcagtattggacaagaaattattatgaacctggcataccactgattctaaattttgccaagatggttgtatcggagaaaataccgggggcagaggatcttttgcaaaagataaatgaaaaactgataaatgagaatgagaaagaaccagtggatcctaagcaacaagattcggtatcggcagtcgtacagacaactaaacgtgacaataaatcaccgatacacatgtcttcgtcttctttaccatcttctgcttcttcagcgttttttagattgaagaaattgaagctcttggatattgacccatacacatatgccacacaattgactgtacttgaacatgacttatacctcaggatcactatgtttgaatgcttggatagggcatggggtaccaagtattgtaatatgggtggttctccgaacattacgaaatttatagctaatgctaatacgctaactaattttgtttctcataccattgtaaaacaggcagatgtcaagacacgttcaaaattaacgcaatattttgttaccgttgcccagcattgtaaagagttgaataatttttcttcaatgactgccatagtgtccgctttgtattcctccccaatctaccgactgaaaaagacatgggatttagtttccactgagtcgaaggaccttctgaagaacctaaacaaccttatggattccaagagaaattttgtgaagtatagagagctgttgcgatccgtgacggacgttgcatgtgttcccttttttggtgtatacctatctgatttaacatttacgtttgtcggaaacccagattttcttcacaattcaaccaacataataaacttcagcaagaggactaaaatcgcaaatatagtggaggaaattataagctttaaaagattccattacaagctgaaacgattggatgatattcagaccgttatagaagcgtctttggaaaatgtcccccacattgaaaagcagtatcaattatcactgcaagtggaaccgagatcaggaaacaccaaaggcagtacgcatgcttcttctgctagcggtacaaaaactgcaaaattcctaagtgaatttacagatgataaaaatggcaattttttgaagctaggtaagaaaaaacctccttctaggttatttcgataa

SEQ ID NO: 64 - protein, 1589 aa, Saccharomyces cerevisiae
MSDTNTSIPNTSSAREAGNASQTPSISSSSNTSTTTNTESSSASLSSSPSTSELTSIRPIGIVVAAYDFNYPIKKDSSSQLLSVQQGETIYILNKNSSGWWDGLVIDDSNGKVNRGWFPQNFGRPLRDSHLRKHSHPMKKYSSSKSSRRSSLNSLGNSAYLHVPRNPSKSRRGSSTLSASLSNAHNAETSSGHNNTVSMNNSPFSAPNDASHITPQSSNFNSNASLSQDMTKSADGSSEMNTNAIMNNNETNLQTSGEKAGPPLVAEETIKILPLEEIEMIINGIRSNIASTWSPIPLITKTSDYKLVYYNKDLDIYCSELPLISNSIMESDDICDSEPKFPPNDHLVNLYTRDLRKNANIEDSSTRSKQSESEQNRSSLLMEKQDSKETDGNNNSINDDDNNNENNKNEFNEAGPSSLNSLSAPDLTQNIQSRVVAPSRSSILAKSDIFYHYSRDIKLWTELQDLTVYYTKTAHKMFLKENRLNFTKYFDLISDSIVFTQLGCRLMQHEIKAKSCSKEIKKIFKGLISSLSRISINSHLYFDSAFHRKKMDTMNDKDNDNQENNCSRTEGDDGKIEVDSVHDLVSVPLSGKRNVSTSTTDTLTPMRSSFSTVNENDMENFSVLGPRNSVNSVVTPRTSIQNSTLEDFSPSNKNFKSAKSIYEMVDVEFSKFLRHVQLLYFVLQSSVFSDDNTLPQLLPRFFKGSFSGGSWTNPFSTFITDEFGNATKNKAVTSNEVTASSSKNSSISRIPPKMADAIASASGYSANSETNSQIDLKASSAASGSVFTPFNRPSHNRTFSRARVSKRKKKYPLTVDTLNTMKKKSSQIFEKLNNATGEHLKIISKPKSRIRNLEINSSTYEQINQNVLLLEILENLDLSIFINLKNLIKTPSILLDLESEEFLVHAMSSVSSVLTEFFDIKQAFHDIVIRLIMTTQQTTLDDPYLFSSMRSNFPVGHHEPFKNISNTPLVKGPFHKKNEQLALSLFHVLVSQDVEFNNLEFLNNSDDFKDACEKYVEISNLACIIVDQLIEERENLLNYAARMMKNNLTAELLKGEQEKWFDIYSEDYSDDDSENDEAIIDDELGSEDYIERKAANIEKNLPWFLTSDYETSLVYDSRGKIRGGTKEALIEHLTSHELVDAAFNVTMLITFRSILTTREFFYALIYRYNLYPPEGLSYDDYNIWIEKKSNPIKCRVVNIMRTFLTQYWTRNYYEPGIPLILNFAKMVVSEKIPGAEDLLQKINEKLINENEKEPVDPKQQDSVSAVVQTTKRDNKSPIHMSSSSLPSSASSAFFRLKKLKLLDIDPYTYATQLTVLEHDLYLRITMFECLDRAWGTKYCNMGGSPNITKFIANANTLTNFVSHTIVKQADVKTRSKLTQYFVTVAQHCKELNNFSSMTAIVSALYSSPIYRLKKTWDLVSTESKDLLKNLNNLMDSKRNFVKYRELLRSVTDVACVPFFGVYLSDLTFTFVGNPDFLHNSTNIINFSKRTKIANIVEEIISFKRFHYKLKRLDDIQTVIEASLENVPHIEKQYQLSLQVEPRSGNTKGSTHASSASGTKTAKFLSEFTDDKNGNFLKLGKKKPPSRLFR

SEQ ID NO: 65 - DNA, 897 bp, Saccharomyces cerevisiae
atgagcggtgaattagcaaattacaaaagacttgagaaagtcggtgaaggtacatacggtgttgtttataaagcgttagacttaagacctggccaaggtcaaagagtagtcgcattgaagaaaataagactagagagtgaagacgagggtgttcccagtacagccatcagagaaatctcattattgaaggaattaaaagacgataatattgtcagattatacgatattgttcactctgatgcacacaagctatatcttgtttttgagttcctcgatttggacctgaaaagatatatggagggtattccaaaggaccaaccgttaggagctgatattgttaagaagtttatgatgcaactttgtaagggtattgcatactgccactcacaccgtattctgcatcgtgatttaaaaccgcagaacttattgattaacaaagatgggaatctaaaactaggtgattttggcttagcgcgtgcttttggtgttccgttgagagcttacacacatgaaattgttactctatggtatagagctccggaggtattactgggtggaaaacaatatagtacaggtgtcgatacatggtccatcggctgtatatttgccgaaatgtgtaacaggaaaccaatcttcagtggcgatagtgagatcgatcagattttcaagatattcagagtattgggaacgccgaatgaagctatatggccagatattgtctacttgcctgatttcaagccaagctttcctcaatggcgcagaaaagacctatcacaagtggtaccaagtctagatccacgcggtattgatttgttggacaaactcctcgcgtatgaccctattaaccggattagcgccagaagagcagccatccacccctacttccaagaatcataa

SEQ ID NO: 66 - protein, 298 aa, Saccharomyces cerevisiae
MSGELANYKRLEKVGEGTYGVVYKALDLRPGQGQRVVALKKIRLESEDEGVPSTAIREISLLKELKDDNIVRLYDIVHSDAHKLYLVFEFLDLDLKRYMEGIPKDQPLGADIVKKFMMQLCKGIAYCHSHRILHRDLKPQNLLINKDGNLKLGDFGLARAFGVPLRAYTHEIVTLWYRAPEVLLGGKQYSTGVDTWSIGCIFAEMCNRKPIFSGDSEIDQIFKIFRVLGTPNEAIWPDIVYLPDFKPSFPQWRRKDLSQVVPSLDPRGIDLLDKLLAYDPINRISARRAAIHPYFQES

SEQ ID NO: 67 - DNA, 576 bp, Saccharomyces cerevisiae
atgcaaacgctaaagtgtgttgttgtcggtgatggtgctgttgggaaaacgtgccttctaatctcctatacaacgaatcaatttccagccgactatgttccaacagtgttcgataactatgcggtgactgtgatgattggtgatgaaccatatacgttaggtttgtttgatacggccggtcaagaagattacgatcgattgagacccttgtcatatccttctactgatgtatttttggtttgtttcagtgttatttccccaccctcttttgaaaacgttaaagaaaaatggttccctgaagtacatcaccattgtccaggtgtaccatgcctggtcgtcggtacgcagattgatctaagggatgacaaggtaatcatcgagaagttgcaaagacaaagattacgtccgattacatcagaacaaggttccaggttagcaagagaactgaaagcagtaaaatatgtcgagtgttcggcactaacacaacgcggtttgaagaatgtattcgatgaagctatcgtggccgccttggagcctcctgttatcaagaaaagtaaaaaatgtgcaattttgtag

SEQ ID NO: 68 - protein, 191 aa, Saccharomyces cerevisiae
MQTLKCVVVGDGAVGKTCLLISYTTNQFPADYVPTVFDNYAVTVMIGDEPYTLGLFDTAGQEDYDRLRPLSYPSTDVFLVCFSVISPPSFENVKEKWFPEVHHHCPGVPCLVVGTQIDLRDDKVIIEKLQRQRLRPITSEQGSRLARELKAVKYVECSALTQRGLKNVFDEAIVAALEPPVIKKSKKCAIL

SEQ ID NO: 69 - DNA, 1581 bp, Saccharomyces cerevisiae
atggcacaaaacaattttgattttaaattcagccaatgttttggtgataaagcagatattgtggtgacagaggcggatctaattacagctgtagaatttgactatactggaaattatctggccactggtgataaaggtggccgtgtggtactttttgaaagaagtaatagtagacattgcgaatataagtttttaacagagtttcaaagtcatgacgcagaatttgattatttaaaatccttagaaattgaagagaagataaatgaaatcaaatggttacgaccaactcaaagatcacactttcttttgagcacaaatgataaaactataaaactttggaaagtttatgagaaaaatataaaattggtaagccagaacaacttaacagaaggggttacgtttgcgaaaaaaggcaagcccgataaccataacagtagaggaggctccgtgagggctgtattatctttacaatcgctgaaactgcctcaattatcacagcatgacaaaatcattgctgccaccccaaagcgtatatatagtaatgcacatacctatcacattaattcgatatcgttgaattctgatcaggaaacatttttaagtgctgacgacttgagaatcaatttatggaatctggacataccagatcagagcttcaacatcgtagatatcaagccaaccaatatggaagaacttaccgaagtgatcacaagcgctgaatttcatccgcaagaatgtaatttattcatgtactcttcttccaaaggtacaataaagttgtgtgatatgagacaaaattccctatgtgacaataaaaccaaaacatttgaagaatatttggatccaatcaatcataatttttttacagaaatcacgtcgtcaatttccgacataaaatttagtccaaatggtaggtatattgcatccagagattatttaactgtcaaaatttgggacgtaaatatggataataagcctttgaaaaccataaacatacatgagcaattgaaggaaagattgagtgatacctatgaaaacgatgcgattttcgataaatttgaagttaattttagtggtgatagttcaagtgtaatgactggttcttacaataacaatttcatgatctatcctaatgtagtaacttctggtgataatgataatggcatagtcaaaacttttgatgaacacaacgcacctaatagcaacagcaataaaaatatccacaacagcatacaaaataaagattctagtagtagtggcaacagccacaagcgtaggagtaacggacgcaacacaggcatggtgggaagtagtaatagctctagaagcagtatagcgggaggagaaggagcaaattcggaggactcgggaaccgaaatgaatgaaatcgtgttacaagctgacaaaacagcgttcaggaacaaaagatacggttcgctagcgcaaaggtctgcaagaaataaggattggggtgacgatattgatttcaagaagaatattttacatttctcatggcatccaagagaaaatagtattgctgttgcagcaactaataatttattcattttttccgcattataa

SEQ ID NO: 70 - protein, 526 aa, Saccharomyces cerevisiae
MAQNNFDFKFSQCFGDKADIVVTEADLITAVEFDYTGNYLATGDKGGRVVLFERSNSRHCEYKFLTEFQSHDAEFDYLKSLEIEEKINEIKWLRPTQRSHFLLSTNDKTIKLWKVYEKNIKLVSQNNLTEGVTFAKKGKPDNHNSRGGSVRAVLSLQSLKLPQLSQHDKIIAATPKRIYSNAHTYHINSISLNSDQETFLSADDLRINLWNLDIPDQSFNIVDIKPTNMEELTEVITSAEFHPQECNLFMYSSSKGTIKLCDMRQNSLCDNKTKTFEEYLDPINHNFFTEITSSISDIKFSPNGRYIASRDYLTVKIWDVNMDNKPLKTINIHEQLKERLSDTYENDAIFDKFEVNFSGDSSSVMTGSYNNNFMIYPNVVTSGDNDNGIVKTFDEHNAPNSNSNKNIHNSIQNKDSSSSGNSHKRRSNGRNTGMVGSSNSSRSSIAGGEGANSEDSGTEMNEIVLQADKTAFRNKRYGSLAQRSARNKDWGDDIDFKKNILHFSWHPRENSIAVAATNNLFIFSAL

SEQ ID NO: 71 - DNA, 3396 bp, Saccharomyces cerevisiae
atgagtgatcaaaataatcgatcgagaaatgaatatcactcaaaccggaagaatgaaccttcctatgaactccaaaatgcacatagcgggctatttcactcttctaatgaagaattaacaaacaggaaccaaagatataccaatcaaaatgccagcatgggttcattcactccagtccaatctttgcaatttccagaacaatctcagcaaacaaatatgctttataacggtgacgatggcaataataatactatcaatgataacgaacgagacatatatggaggttttgtcaaccaccatcgccagcgtcccccaccagcaactgcagaatacaatgacgtttttaatacgaatagtcaacagctaccgtcggaacatcaatacaataacgtaccttcatatccacttccttcgataaatgtgattcaaaccactccagaactcatacataacggctcacagactatggccacccccatcgaaaggcccttctttaacgaaaacgactactattataataacaggaactctaggacgtcaccgagtattgcttctagtagcgatggttatgcagatcaggaagctaggcccattttggagcaacccaacaataacatgaatagcggtaatattcctcaataccatgaccaaccttttggatacaacaatggttaccatggcctacaggcaaaagattactatgacgatccggagggtggttatattgatcagagaggagatgactatcagattaattcatatttgggtagaaacggtgaaatggttgatccttacgattatgaaaacagtttaagacatatgactcctatggagcgtagagaatatcttcatgatgatagcagacccgtaaacgatggaaaagaagaattagacagtgtgaaaagcggttactctcatagagacttgggggaatatgacaaggatgatttttcaagggatgacgagtacgatgatctcaacactattgataaattacagtttcaagctaatggtgtacctgcatcatcctcggtgtcttctatcggatctaaagaatccgacataatagtaagcaatgataacttaaccgcaaatagagcactaaagagaagcggtactgaaattaggaaattcaaactttggaatggtaattttgttttcgattctccaatcagtaagacgctattggaccaatacgctactacaacagaaaatgcaaacactttaccaaatgagtttaagtttatgagatatcaagcagttacttgcgaacctaatcaacttgcagagaagaatttcacggtgaggcagttgaagtatttaactccaagggaaacggaattgatgctagtagtcacaatgtataatgaagaccatatcctgttaggaagaactttgaaaggtattatggacaatgtcaaatatatggtgaaaaaaaaaaattcaagcacttgggggccggatgcatggaaaaagattgtcgtttgtatcatttcagatggtagatccaaaattaatgaacgctcgctagcattactaagttcgttaggttgttaccaggacgggtttgctaaggatgaaattaatgaaaaaaaagtggcaatgcatgtctacgaacatacgacaatgatcaacatcacaaatatttcggaatcagaggtttcattagaatgcaatcaaggtaccgttccaatacaacttttgttttgtttgaaagagcaaaatcagaaaaaaattaactcacatagatgggcatttgaaggctttgcagaattactgcgtcccaatatcgttacattgttagatgctggtaccatgccaggtaaagattctatttaccagttatggagagagttcaggaatccaaatgttggtggcgcatgtggtgaaataagaactgatttgggtaagagatttgtaaagcttttgaatcctttagttgcatcacagaatttcgaatacaaaatgtccaatattttagacaaaacaaccgagtctaactttggatttattactgttctaccgggggcattctctgcgtataggtttgaagctgtgagaggccaaccattacagaagtacttttatggtgaaattatggaaaatgaaggttttcattttttttcttccaatatgtatcttgctgaagatcgtattttatgctttgaagtggtcacaaaaaaaaattgtaattggattttgaaatactgcagaagttcttatgcttcaacagatgtaccggagagggtccctgaatttattcttcagaggaggcgttggttgaatggttcattttttgctagtgtatattccttttgtcatttttacagagtctggagcagtggtcataatattggtagaaaactccttttgacggttgaatttttttaccttttcttcaatacattgatttcatggttttcattgagttcatttttcctattctttagaattctcactgtttctattgcactggcataccattcagcatttaatgtgttgtccgtcatattcctgtggctttatgggatttgtaccttatcaacattcatactgtcattgggtaataaacctaaaagtactgagaaattttatgttctaacttgcgtcatttttgcggtgatgatgatttacatgatattctgcagtatattcatgagtgtcaaatccttccaaaatatattgaaaaacgataccatcagctttgagggtttgattaccacagaagctttcagggatattgttatctctctgggctccacttattgtttgtacctaatcagttcaattatctatttgcagccatggcatatgttgacaagttttattcagtatattttattgagtccttcttacatcaatgttttgaatatctatgcattttgtaatgtccacgacttatcatggggtacaaagggtgcaatggcaaatccgctgggtaagattaatactacagaagatggtacgttcaaaatggaagttctggtctctagttcagagattcaagcaaactacgataaatatttgaaagttttaaatgacttcgatccaaaatcagaatctcggcctactgagccatcttatgatgaaaaaaagactggctattatgcaaacgttagatctctcgtgattatcttttgggtcatcacaaatttcatcatcgttgctgttgtcttagaaaccggtgggattgcagattatattgctatgaaatccatatcaactgatgacactttagaaactgcaaagaaggcggaaattcccttaatgaccagtaaggcctcaatttattttaatgtaattttatggttagttgcattatcggcattaataaggttcattggttgctcaatatacatgatagtaaggttttttaaaaaggttacatttcgctaa

SEQ ID NO: 72 - protein, 1131 aa, Saccharomyces cerevisiae
MSDQNNRSRNEYHSNRKNEPSYELQNAHSGLFHSSNEELTNRNQRYTNQNASMGSFTPVQSLQFPEQSQQTNMLYNGDDGNNNTINDNERDIYGGFVNHHRQRPPPATAEYNDVFNTNSQQLPSEHQYNNVPSYPLPSINVIQTTPELIHNGSQTMATPIERPFFNENDYYYNNRNSRTSPSIASSSDGYADQEARPILEQPNNNMNSGNIPQYHDQPFGYNNGYHGLQAKDYYDDPEGGYIDQRGDDYQINSYLGRNGEMVDPYDYENSLRHMTPMERREYLHDDSRPVNDGKEELDSVKSGYSHRDLGEYDKDDFSRDDEYDDLNTIDKLQFQANGVPASSSVSSIGSKESDIIVSNDNLTANRALKRSGTEIRKFKLWNGNFVFDSPISKTLLDQYATTTENANTLPNEFKFMRYQAVTCEPNQLAEKNFTVRQLKYLTPRETELMLVVTMYNEDHILLGRTLKGIMDNVKYMVKKKNSSTWGPDAWKKIVVCIISDGRSKINERSLALLSSLGCYQDGFAKDEINEKKVAMHVYEHTTMINITNISESEVSLECNQGTVPIQLLFCLKEQNQKKINSHRWAFEGFAELLRPNIVTLLDAGTMPGKDSIYQLWREFRNPNVGGACGEIRTDLGKRFVKLLNPLVASQNFEYKMSNILDKTTESNFGFITVLPGAFSAYRFEAVRGQPLQKYFYGEIMENEGFHFFSSNMYLAEDRILCFEVVTKKNCNWILKYCRSSYASTDVPERVPEFILQRRRWLNGSFFASVYSFCHFYRVWSSGHNIGRKLLLTVEFFYLFFNTLISWFSLSSFFLFFRILTVSIALAYHSAFNVLSVIFLWLYGICTLSTFILSLGNKPKSTEKFYVLTCVIFAVMMIYMIFCSIFMSVKSFQNILKNDTISFEGLITTEAFRDIVISLGSTYCLYLISSIIYLQPWHMLTSFIQYILLSPSYINVLNIYAFCNVHDLSWGTKGAMANPLGKINTTEDGTFKMEVLVSSSEIQANYDKYLKVLNDFDPKSESRPTEPSYDEKKTGYYANVRSLVIIFWVITNFIIVAVVLETGGIADYIAMKSISTDDTLETAKKAEIPLMTSKASIYFNVILWLVALSALIRFIGCSIYMIVRFFKKVTFR

SEQ ID NO: 73 - DNA, 2892 bp, Saccharomyces cerevisiae
atgacgagaaacccgtttatggtggaaccttcgaatggctctcctaatagacgtggtgcttcaaacctctccaaattttacgcaaacgctaacagcaactctcggtgggctaatcccagtgaggagagtttggaggatagctatgaccaatctaacgttttccaaggccttccggcatctccttcgagagctgcactaagatactccccagaccgtcgccatagaactcaattttaccgcgatagtgcccataactctccagttgctccgaacaggtatgctgctaatctacaagagtctcccaaaagagcaggcgaggctgtcatacatctaagtgaggggagtaacctttacccccgcgataatgcagatctaccggtagacccctaccatctatcaccccagcaacagcccagtaacaatctgtttggaagtggcagattgtattctcaaagctcgaaatacacgatgtctactacttccacaacggctccctctctggcagaagcagacgatgaaaaggaaaaatacctcacttcgactacttcctatgatgatcagtctacaattttctctgcagacactttcaatgaaacaaaatttgaactgaaccatccaacaagacagcagtatgtaagacgtgccaattctgagagtaagagaagaatggtctcagacttgcctcccccaagcaagaagaaggcactattgaaactagacaacccgataccaaaaggtctgttggatactttgcctcgtaggaactcccctgagtttacggaaatgagatatacagcctgcactgtggaacctgacgattttttgagagaaggttacactttgagattcgcagagatgaacagagaatgtcaaattgccatttgtattaccatgtacaatgaagataaatattcattggcaagaaccatccactccattatgaagaatgttgctcatctttgtaagcgtgaaaaatctcatgtttggggccccaatggctggaagaaagtctctgtaattctgattagtgacggtagagcaaaagtcaaccaagggtctctcgactatttagctgctttgggtgtttatcaagaagatatggccaaggcgtctgtgaatggtgatccggtaaaagcgcacatttttgaattgacaactcaggtctctatcaacgccgatctggattatgtttcaaaggacattgttcctgtgcaattggttttttgtctaaaagaagaaaataagaaaaagatcaattcccatcgttggctattcaacgcgttttgtcccgttttgcaacctactgtagttactttggttgatgtcggtacacgtttaaacaatacagcaatttacaggttatggaaggtttttgatatggattcaaatgtggctggtgcggctggtcagattaagactatgaaggggaagtggggactgaaacttttcaatccattagttgcatcgcaaaattttgaatataagatctcgaatattttagataaaccattagaaagtgtttttggttatatctctgttcttcctggtgccctgtccgcatataggtatagagccttaaaaaatcatgaagatggcactggccctctcagatcgtatttccttggtgaaactcaagaaggcagagaccatgatgttttcactgcaaatatgtacttggctgaagatagaattctttgttgggaattggtcgccaagcgagatgcaaaatgggttctaaaatatgttaaggaagccactggtgaaacggatgttcccgaagacgtttctgaatttatttctcaaagaagacgttggttaaatggtgcaatgtttgccgcaatttatgctcaattgcatttctaccaaatttggaaaactaaacattctgttgtacgcaagttctttcttcatgttgaattcctttatcaatttattcagatgcttttttcctggttttctattgcaaatttcgttcttaccttttattatttagcaggatcaatgaatttagttattaaacatggtgaggccttattcattttttttaaatacctgatcttttgtgacttggcaagtttattcattatttccatgggtaatagaccccagggcgcgaaacatttattcattacctccatggttatactgtctatatgtgccacatattctctaatttgtgggtttgtttttgctttcaagtcgttagcttctggaacggaatcccacaaaatatttgtcgacatcgttatctcattgctctccacctatggcctatactttttctcatcactgatgtacctagatccttggcacatgtttacatcatccatacaatactttttgacacttcccgcctttacgtgtactttacagatttttgccttctgtaatacacacgacgtttcctggggtactaaaggttccacacaggagtccaagcaattgtccaaggccattgtcgttcaaggtccagatgggaaacagattgtggaaacagattggcctcaggaagttgataagaagtttttggaaataaaaagtcgtttgaaagaaccagaatttgaagaatcaagcggcaatgaaaaacaatccaagaatgattattatagagatataagaaccagaattgtgatgatttggatgctatcaaatctaatactgatcatgtctataattcaagtctttacaccacaagatactgacaatggttatttgatattcattttatggtctgtggccgctttagctgcctttagggtggttggttccatggcctttttgttcatgaaatacttgcgtataatagtgagttacagaaataaagttgaaggtagcggctcatgggaagtctctaaattagacttaccaaatgttttccacaaaaagggctaa

SEQ ID NO: 74 - protein, 963 aa, Saccharomyces cerevisiae
MTRNPFMVEPSNGSPNRRGASNLSKFYANANSNSRWANPSEESLEDSYDQSNVFQGLPASPSRAALRYSPDRRHRTQFYRDSAHNSPVAPNRYAANLQESPKRAGEAVIHLSEGSNLYPRDNADLPVDPYHLSPQQQPSNNLFGSGRLYSQSSKYTMSTTSTTAPSLAEADDEKEKYLTSTTSYDDQSTIFSADTFNETKFELNHPTRQQYVRRANSESKRRMVSDLPPPSKKKALLKLDNPIPKGLLDTLPRRNSPEFTEMRYTACTVEPDDFLREGYTLRFAEMNRECQIAICITMYNEDKYSLARTIHSIMKNVAHLCKREKSHVWGPNGWKKVSVILISDGRAKVNQGSLDYLAALGVYQEDMAKASVNGDPVKAHIFELTTQVSINADLDYVSKDIVPVQLVFCLKEENKKKINSHRWLFNAFCPVLQPTVVTLVDVGTRLNNTAIYRLWKVFDMDSNVAGAAGQIKTMKGKWGLKLFNPLVASQNFEYKISNILDKPLESVFGYISVLPGALSAYRYRALKNHEDGTGPLRSYFLGETQEGRDHDVFTANMYLAEDRILCWELVAKRDAKWVLKYVKEATGETDVPEDVSEFISQRRRWLNGAMFAAIYAQLHFYQIWKTKHSVVRKFFLHVEFLYQFIQMLFSWFSIANFVLTFYYLAGSMNLVIKHGEALFIFFKYLIFCDLASLFIISMGNRPQGAKHLFITSMVILSICATYSLICGFVFAFKSLASGTESHKIFVDIVISLLSTYGLYFFSSLMYLDPWHMFTSSIQYFLTLPAFTCTLQIFAFCNTHDVSWGTKGSTQESKQLSKAIVVQGPDGKQIVETDWPQEVDKKFLEIKSRLKEPEFEESSGNEKQSKNDYYRDIRTRIVMIWMLSNLILIMSIIQVFTPQDTDNGYLIFILWSVAALAAFRVVGSMAFLFMKYLRIIVSYRNKVEGSGSWEVSKLDLPNVFHKKG

SEQ ID NO: 75 - DNA, 3498 bp, Saccharomyces cerevisiae
atgaccggcttgaatggagatgatcctgatgactactatctgaaccttaatcaagatgaagagtctctacttaggtcaagacacagtgtcggctcaggagcacctcatagacaaggctctttagtgcggcccgaaagaagccgactgaacaatcctgataatccacatttttattatgcgcagaaaacgcaggagcagatgaatcacctggatgttttaccatcaagtaccggtgtaaacccaaatgcaactcgtcggagtggctccctgcgctccaaaggctcagtgagaagcaaatttagtggccgcgaaacggatagctatcttttacaagatatgaatactactgacaagaaggcttccgttaaaataagtgatgaaggtgttgcggaagacgaatttgataaagatggtgatgtggacaatttcgaagaaagctccacgcagcccataaataagtctatcaaaccattaagaaaggaaacgaatgatacattgtcattttggcagatgtactgttatttcattacgttttgggcacctgctccaattcttgctttctgcgggatgccaaagaaggaaagacaaatggcgtggagagaaaaggttgctttaatttctgtcatcttgtacattggtgcgattgtggctttcctgacttttggtttcactaaaaccgtttgtagtagttcgaaactacgtttgaaaaacaacgaagtatcaacagaatttgtcgtaattaacggtaaggcttatgaattggatacttcctcgcgttccggtatacaagacgttgaagtagattcagacaccctttatgggccctggtcagatgctggtaaagatgcttcgttcttgtttcaaaatgtgaatggtaactgtcataaccttataactccaaagagtaattcttccattccccatgacgatgataataatttagcatggtattttccttgtaagttaaagaatcaagatggctcttcgaagccaaacttcacagttgaaaattacgcaggatggaactgtcatacgtctaaagaagatagggacgcattttacggtttaaagtcgaaagctgatgtttacttcacttgggatggtataaagaactcttctagaaacttgattgtttataatggcgacgttttggatttagatcttcttgattggttggaaaaggatgacgttgactatcccgttgtattcgatgacttgaagacttcaaatttacaaggttatgatctttcgttggttttgtcaaatgggcatgaaagaaaaattgcgagatgtttgagcgaaattattaaagttggtgaagtagactccaaaaccgtcggttgtattgcctctgatgtcgttttgtatgtttctctggtatttattctttcagtggtgataattaaattcataattgcctgctacttccgttggactgtagctaggaaacaaggtgcatatatcgtggacaataaaacaatggataaacacacaaacgatatcgaggattggtctaataatattcaaacaaaagctcctctaaaggaagtagatcctcatttgaggccaaagaaatactcaaaaaagtcgttgggacacaagcgtgcttcaacctttgacttgctgaaaaaacacagctccaaaatgtttcaatttaacgaatctgtgatagatctagacacctccatgagcagttcactacaatcttctggttcatacagaggaatgacaacaatgaccactcaaaatgcttggaaactctcgaatgaaaacaaagctgtacattcccgtaatccatctactttgttgcctacatcctcgatgttttggaataaagcgacttcctctcctgtaccaggatcatcgctgattcagagtcttgattcgacgattatacatcccgatatcgttcaacaaccaccactggattttatgccatacgggttcccattgattcatactatctgttttgttacttgttattctgaggatgaagagggtttaagaaccactttagactctctttctaccacagattatccaaattcccataaactactgatggttgtttgtgatggtttaattaagggctcgggcaacgataagactactccagagatagcgttaggaatgatggacgactttgtcaccccacctgatgaagttaaaccttactcctatgtggcagtggcatcaggctctaaaagacacaatatggccaagatatatgcgggtttttacaaatatgacgattctacaattccaccagaaaatcaacaacgtgtcccaatcattacaattgtgaagtgcggtactcctgcagagcagggggccgccaaacccggtaacagaggtaagcgtgattctcaaattattctgatgtcctttttagaaaaaataacatttgatgaaagaatgactcaattggaatttcagcttttaaaaaatatttggcagattacggggctaatggcagacttctacgaaacggtacttatggttgatgctgatactaaagtctttcccgatgctttaactcatatggtcgctgaaatggttaaagatcctttgattatgggtctttgtggtgagaccaagatcgctaataaggcacaatcttgggtaactgcaattcaagtgtttgagtactatatttcgcatcatcaggctaaagcttttgaatctgtcttcggttcggtaacttgtttgccgggatgtttctcaatgtatcgtataaaatctcctaaaggttcagatggttattgggtacctgtattggcaaatccagatattgttgaaagatattcggataatgttacaaacactttgcataagaagaacttattattacttggtgaagatagatttttatcttcattaatgttaaagactttccctaagagaaagcaagtatttgttccaaaagctgcttgtaaaactattgcccctgataaattcaaagtcttactttcccagcgtcgaagatggattaattctacggtacataacctttttgaattagttctaatcagagacttatgtggcactttctgtttttccatgcaatttgtgattggtattgaattgattggtactatggtactgccgttagccatttgctttactatttatgtcattatttttgccattgtatcaaaacctacacccgtaatcactttagttttactggcaattattcttggtctgcccggcttaattgttgttataactgctacgagatggtcgtacctatggtggatgtgcgtatatatttgtgctttgcctatttggaatttcgtactaccttcatatgcgtactggaaatttgatgacttctcatggggtgatacgagaactattgcgggaggtaataaaaaggcacaagacgagaatgaaggtgaatttgatcactcaaagattaaaatgaggacatggagggaatttgaaagggaagatattctcaatcggaaggaggaaagtgactccttcgttgcatag

SEQ ID NO: 76 - protein, 1165 aa, Saccharomyces cerevisiae
MTGLNGDDPDDYYLNLNQDEESLLRSRHSVGSGAPHRQGSLVRPERSRLNNPDNPHFYYAQKTQEQMNHLDVLPSSTGVNPNATRRSGSLRSKGSVRSKFSGRETDSYLLQDMNTTDKKASVKISDEGVAEDEFDKDGDVDNFEESSTQPINKSIKPLRKETNDTLSFWQMYCYFITFWAPAPILAFCGMPKKERQMAWREKVALISVILYIGAIVAFLTFGFTKTVCSSSKLRLKNNEVSTEFVVINGKAYELDTSSRSGIQDVEVDSDTLYGPWSDAGKDASFLFQNVNGNCHNLITPKSNSSIPHDDDNNLAWYFPCKLKNQDGSSKPNFTVENYAGWNCHTSKEDRDAFYGLKSKADVYFTWDGIKNSSRNLIVYNGDVLDLDLLDWLEKDDVDYPVVFDDLKTSNLQGYDLSLVLSNGHERKIARCLSEIIKVGEVDSKTVGCIASDVVLYVSLVFILSVVIIKFIIACYFRWTVARKQGAYIVDNKTMDKHTNDIEDWSNNIQTKAPLKEVDPHLRPKKYSKKSLGHKRASTFDLLKKHSSKMFQFNESVIDLDTSMSSSLQSSGSYRGMTTMTTQNAWKLSNENKAVHSRNPSTLLPTSSMFWNKATSSPVPGSSLIQSLDSTIIHPDIVQQPPLDFMPYGFPLIHTICFVTCYSEDEEGLRTTLDSLSTTDYPNSHKLLMVVCDGLIKGSGNDKTTPEIALGMMDDFVTPPDEVKPYSYVAVASGSKRHNMAKIYAGFYKYDDSTIPPENQQRVPIITIVKCGTPAEQGAAKPGNRGKRDSQIILMSFLEKITFDERMTQLEFQLLKNIWQITGLMADFYETVLMVDADTKVFPDALTHMVAEMVKDPLIMGLCGETKIANKAQSWVTAIQVFEYYISHHQAKAFESVFGSVTCLPGCFSMYRIKSPKGSDGYWVPVLANPDIVERYSDNVTNTLHKKNLLLLGEDRFLSSLMLKTFPKRKQVFVPKAACKTIAPDKFKVLLSQRRRWINSTVHNLFELVLIRDLCGTFCFSMQFVIGIELIGTMVLPLAICFTIYVIIFAIVSKPTPVITLVLLAIILGLPGLIVVITATRWSYLWWMCVYICALPIWNFVLPSYAYWKFDDFSWGDTRTIAGGNKKAQDENEGEFDHSKIKMRTWREFEREDILNRKEESDSFVA

SEQ ID NO: 77 - DNA, 1476 bp, Saccharomyces cerevisiae
atgtccaacccaatagaaaacacagaaaactcacagaatactagttcatcaaggtttttgaggaatgtacaaaggttggccttaaacaatgtaacaaatacgacatttcaaaagagtaatgcgaataatccagccctaacaaatttcaaatctacactaaactcagtaaagaaggagggaagtcggattcctcaatttactagagaaagcgtatcaagatcaacagccgcacaagaggagaaaagaaccctgaaagaaaatggtatccaactccccaaaaacaatcttttagatgataaagaaaaccaagacccaagtagtcagcaatttggtgcgctaacttctataaaggaggggagagctgagctgcctgcaaatataagtttacaagaatcctcctcagcgaaggagataatccagcatgatcccctaaaaggcgttggatcaagcactgaggtagtccataactcggtagaaaacgaaaaacttcatccagctagaagtcaacttcaagttagaaataccgaaagtgaaactgatagtggaaaaaaaagaccaatttctacaattgttgaacaagaactgcccaaaaagtttaaagtgtgcgatgaaaatggcaaagaagaatatgaatgggaagacctagatgcagaagatgtaaatgatccattcatggtcagcgagtacgtcaatgatatattcgaatatctccaccaactagaggtcattactcttccaaagaaggaagatctctatcagcatagaaatattcatcaaaatcgagatatcctagttaattggttggttaaaatccataataaattcggcttattaccggagactttgtatcttgccattaacataatggacaggtttttaggtaaagagctagttcaactggataagttacaattggttggcacatcatgccttttcattgcctctaaatatgaagaggtctattctcctagtataaaacatttcgcatcagagacagacggtgcatgtacggaagatgaaatcaaagaaggggagaaattcattttaaagacattgaaatttaacctaaattatcccaatccgatgaattttctgagaagaatttcgaaagcagatgactacgatatacagtctcgaactcttgccaaattcttattagagatatcattggtagatttcagatttattgggatactaccctcattgtgtgcagcagctgcgatgtttatgtcgagaaaaatgttaggtaaaggtaaatgggatggaaatctaatacactatagcggcgggtatactaaagaagaacttgcgcccgtgtgtcacatgataatggattatctagtgagtccaattgttcatgatgaatttcatagaaaatatcaatctagaagatttatgaaagcttctataatttccgtccaatgggctttaaaggttagaaaaaacggctatgatataatgaccttgcatgaatga

SEQ ID NO: 78 - protein, 491 aa, Saccharomyces cerevisiae
MSNPIENTENSQNTSSSRFLRNVQRLALNNVTNTTFQKSNANNPALTNFKSTLNSVKKEGSRIPQFTRESVSRSTAAQEEKRTLKENGIQLPKNNLLDDKENQDPSSQQFGALTSIKEGRAELPANISLQESSSAKEIIQHDPLKGVGSSTEVVHNSVENEKLHPARSQLQVRNTESETDSGKKRPISTIVEQELPKKFKVCDENGKEEYEWEDLDAEDVNDPFMVSEYVNDIFEYLHQLEVITLPKKEDLYQHRNIHQNRDILVNWLVKIHNKFGLLPETLYLAINIMDRFLGKELVQLDKLQLVGTSCLFIASKYEEVYSPSIKHFASETDGACTEDEIKEGEKFILKTLKFNLNYPNPMNFLRRISKADDYDIQSRTLAKFLLEISLVDFRFIGILPSLCAAAAMFMSRKMLGKGKWDGNLIHYSGGYTKEELAPVCHMIMDYLVSPIVHDEFHRKYQSRRFMKASIISVQWALKVRKNGYDIMTLHE

SEQ ID NO: 79 - DNA, 1251 bp, Aspergillus nidulans
atgccgcaaccaggatcgtcagtggatttctcaaatctgctgaaccctcaaaacaacacggccatccctgccgaagtctccaacgctacagctagtgctaccatggcttcaggagccagtctgttgccacctatggtgaagggcgctcgcccggctgcagaggaagctcgtcaggaccttcctcgaccatacaagtgccccctgtgcgagcgcgccttccaccgcctagaacaccaaacaagacacattcgcactcacactggtgaaaagccccatgcctgccagttccccggctgctcgaagcgtttcagtcgctcagatgagcttacccggcactcgcgaatccataacaaccccaactcaagacgtggaaacaaggctcaacacctggcggcagccgccgcagctgcagctgcgaaccaagatggtagcgcgatggcgaacaacgctggatcaatgatgccccctcccagcaaacccatcactcgatctgctcctgtctctcaagtcgggtccccggacatttcgcccccgcactctttctccaactatgccaaccacatgcgctcgaatctgagcccctactctcgtaccagtgaacgggcgtcatcaggcatggatatcaaccttcttgctacggccgcgtctcaagtcgagcgtgatgaaagttttggattccgctctggtcaacgtagtcaccatatgtatggtccccgccatggcagcaggggacttccttctctttcagcctacgccatctcccacagcatgagccgttcccattcgcacgaggatgaggattcttatgcgtcacatcgcgtcaagcgttcaagacctaactcacccaactcgactgctccttcttcgcctaccttctcccacgactccttatctcccactcctgaccacacgccattggctacgcccgcccattcgccacgactgaagccattgtcgccgagtgagctacatctgccctcaatccgtcacctatcgcttcaccacactccggctctcgctccaatggagccccaggccgagggacccaattattataacccgaaccaacctcatgttggcccaagcataagcgatatcatgtctcgccctgagggtgcacagcgaaaacttccgatacctcaggtgcccaaagtggcggtccaggatatgttaaatcctagcgggtttacttcagtctcttcatcaaccgcaaattccgttgctggtggtgacttggctgagaggttctaa

SEQ ID NO: 80 - protein, 416 aa, Aspergillus nidulans
MPQPGSSVDFSNLLNPQNNTAIPAEVSNATASATMASGASLLPPMVKGARPAAEEARQDLPRPYKCPLCERAFHRLEHQTRHIRTHTGEKPHACQFPGCSKRFSRSDELTRHSRIHNNPNSRRGNKAQHLAAAAAAAAANQDGSAMANNAGSMMPPPSKPITRSAPVSQVGSPDISPPHSFSNYANHMRSNLSPYSRTSERASSGMDINLLATAASQVERDESFGFRSGQRSHHMYGPRHGSRGLPSLSAYAISHSMSRSHSHEDEDSYASHRVKRSRPNSPNSTAPSSPTFSHDSLSPTPDHTPLATPAHSPRLKPLSPSELHLPSIRHLSLHHTPALAPMEPQAEGPNYYNPNQPHVGPSISDIMSRPEGAQRKLPIPQVPKVAVQDMLNPSGFTSVSSSTANSVAGGDLAERF

SEQ ID NO: 81 - DNA, 1689 bp, Saccharomyces cerevisiae
atgtcactcctttacatcattcttctattcacacaattcttactactgccaaccgatgcctttgataggtctgctaacacaaatattgctgtttattggggtcaaaactcagcaggaacgcaagaatccttagctacttactgtgaatcttctgatgctgatattttcctattatctttcttgaaccaatttccaacccttggtttgaactttgccaacgcatgctctgatactttttctgatggcttacttcactgcacccagattgctgaagatattgaaacttgccagtccctaggaaagaaagttctattatcattaggtggtgcatctggtagctacctcttttcagatgattctcaagcggaaacttttgcacaaactttatgggatactttcggtgaaggtacaggtgccagtgagagaccatttgactcagcagtcgttgatggttttgattttgatattgaaaacaacaacgaagtaggctatagtgcgttagctaccaagttaagaactttgtttgccgaaggtacaaagcaatattacctttctgccgcaccacaatgtccatacccggatgcttctgttggtgacttgttggaaaatgcagacattgattttgcgttcatccaattttacaataattactgcagtgtgagtggtcaattcaattgggatacttggttaacctatgctcaaactgtatccccaaataaaaatatcaaactgttcttaggtttacctggttctgcttctgctgctggctctggttatatttctgacacttctttattggaatcaactattgcagatattgcctcttcaagttcttttggtggtattgcgttatgggatgcatctcaagccttttccaacgagctaaatggtgaaccatatgttgagattttgaagaatttgctaacaagtgctagccagaccgccactactacagttgccacctcaaaaacctcagcagcctcaacttcatctgcttcaacttcatctgcttcaacttctcagaaaaagaccacacaatctacgacatctacacaaagtaaaagcaaagttactttatctccaactgcaagcagcgctatcaaaacatcaattactcaaactacaaaaacattgacgagtagcaccaagacaaaatctagtctaggtaccaccacaacagagagcactttaaattcagttgctatcacaagtatgaaaactactctatcttcccaaataaccagtgctgccttggtgacccctcaaacaactactactagcatagtttcttcggccccaattcaaacagctatcactagtactctttcgccagcaacgaagagttcttctgtcgtttccctacagacagctactactagtacgctttccccaacaacgaccagtacaagctcaggtagtacaagctcaggtagtacaagctcagacagtacagctcgtacattggctaaagaattgaatgctcaatatgcggctggtaaattgaacggtaaatctacctgtactgaaggtgaaattgcatgctctgctgatgggaagttcgccgtttgtgatcatagcgcttgggtttacatggaatgtgcttctggaaccacatgttatgcttatgactccggcgactcagtctatacccaatgtaatttctcttatttggaaagcaattacttttaa

SEQ ID NO: 82 - protein, 562 aa, Saccharomyces cerevisiae
MSLLYIILLFTQFLLLPTDAFDRSANTNIAVYWGQNSAGTQESLATYCESSDADIFLLSFLNQFPTLGLNFANACSDTFSDGLLHCTQIAEDIETCQSLGKKVLLSLGGASGSYLFSDDSQAETFAQTLWDTFGEGTGASERPFDSAVVDGFDFDIENNNEVGYSALATKLRTLFAEGTKQYYLSAAPQCPYPDASVGDLLENADIDFAFIQFYNNYCSVSGQFNWDTWLTYAQTVSPNKNIKLFLGLPGSASAAGSGYISDTSLLESTIADIASSSSFGGIALWDASQAFSNELNGEPYVEILKNLLTSASQTATTTVATSKTSAASTSSASTSSASTSQKKTTQSTTSTQSKSKVTLSPTASSAIKTSITQTTKTLTSSTKTKSSLGTTTTESTLNSVAITSMKTTLSSQITSAALVTPQTTTTSIVSSAPIQTAITSTLSPATKSSSVVSLQTATTSTLSPTTTSTSSGSTSSGSTSSDSTARTLAKELNAQYAAGKLNGKSTCTEGEIACSADGKFAVCDHSAWVYMECASGTTCYAYDSGDSVYTQCNFSYLESNYF

SEQ ID NO: 83 - DNA, 921 bp, Saccharomyces cerevisiae
atgaattataactgcgaaatacaaaacaggaacagtaagaatgttgacaatcaagtcagtctaccccctatccaagttctatttaactccatagaaaaacggagtatgcccgagttggcattttcgaacatagaatactcgcatgggaaccttcggtctagtaccgaggaacaaaactatcctgcgcctgtgttacttccacagcatcattcgattgcgtatcccgcaattaattctggcggtactagtactactgctactcctactgcttctacagttgaaacgtccaagacgagtagcagtgctatggatacacaatctcaatatggcagttcaaagaagtcaaaatcggcgtccgatgatgcaaagccctgctacaaatccgccccaatatatgaaataatcaataaggaaaaggatgcgggggcacaatacaacaggccattttcggattttgtagaatctaaatcaaggaggaagcaaaattcgggcaggaggtctaacctgccaaaggaaacagtgcagatactgaatacttggttgctgaaccacctgaataacccctacccaactcaacaagaaaagagggagttgttaatcaaaactgggctaaccaagattcaactttctaattggttcataaatgtgagaagacgcaaaatatttagtgattactataccctggtaaactcaattcctaatgacaacgcgaataataccccagtggaacgagttcaaaacgtctcagcatatcataacacattatctgccacaaataatactatgtacgatgctacgtcaacctgctccacggattatgaattatccaagagatttgctcatgcccccgttacacgccgtaaaaaactaattgataggctggaagaattgaaaaagctatccaaccctgatatgaattga

SEQ ID NO: 84 - protein, 306 aa, Saccharomyces cerevisiae
MNYNCEIQNRNSKNVDNQVSLPPIQVLFNSIEKRSMPELAFSNIEYSHGNLRSSTEEQNYPAPVLLPQHHSIAYPAINSGGTSTTATPTASTVETSKTSSSAMDTQSQYGSSKKSKSASDDAKPCYKSAPIYEIINKEKDAGAQYNRPFSDFVESKSRRKQNSGRRSNLPKETVQILNTWLLNHLNNPYPTQQEKRELLIKTGLTKIQLSNWFINVRRRKIFSDYYTLVNSIPNDNANNTPVERVQNVSAYHNTLSATNNTMYDATSTCSTDYELSKRFAHAPVTRRKKLIDRLEELKKLSNPDMN

SEQ ID NO: 85 - DNA, 6081 bp, Saccharomyces cerevisiae
atgtcatcaaaacctgatactggttcggaaatttctggccctcagcgacaggaagaacaagaacaacagatagagcagagctcacctacggaagcaaacgatagaagcattcatgatgaggtaccaaaagtcaagaagcgtcacgaacaaaatagtggtcacaaatcaagaaggaatagcgcatatagttattacagcccacggtcgctttctatgaccaaaagcagggagagtatcactccaaatggtatggatgatgtaagtatttcgaacgtggaacatccaaggccgacagaaccgaaaatcaaaaggggtccatatttactgaagaaaacattgagcagtctttcaatgacgagcgcgaatagtactcatgatgataataaagaccacggttacgctttgaattcatccaagacgcacaactacacatctactcataaccatcatgacggtcatcatgatcatcatcatgttcagttttttcccaataggaagccatcattagcggaaaccctattcaaaaggttttcagggtcaaacagtcacgatggcaataagtcaggaaaggaaagtaaagttgctaacctttccctttcaacggtaaatcctgcacctgctaataggaaaccttctaaagactccactttatctaatcacttggctgataacgtgccaagcactttacgaaggaaagtgtcctcattggtacgtggttcttccgtccatgatataaataatggtattgcagataaacagattagaccaaaggctgttgcgcaatcagaaaatacattacattcatccgatgttcccaatagcaaacgctcgcacagaaaaagctttctgctaggctccacatcttcttcaagcagtagaagaggttcaaatgtcagttcaatgactaacagtgacagtgcaagtatggcgacgtcgggtagtcatgttctccaacataacgtatctaatgtttctccaactactaaaagtaaggacagcgttaacagcgaatccgccgatcacactaataataaatccgagaaagtgactccagaatataatgagaacattccggaaaattctaactctgacaacaaacgcgaagccacaacgcctactatagaaacacccatttcatgtaaaccatcccttttcaggctagatacaaaccttgaggatgttactgatattacaaagacggtgccacccaccgctgtcaattctacactaaattctacacacgggactgagactgcctcacccaaaacggtgatcatgcctgaaggtcctaggaagtcggtgtcaatggctgatctctccgtcgctgccgcagcacctaatggtgaattcacatcaacttccaatgatagatcacaatgggtagcacctcaaagctgggatgtggaaaccaaaaggaaaaaaacaaaacctaaagggagatcgaaatcaagaaggtcaagtatagatgctgatgaacttgatcccatgtcaccggggccaccttcaaaaaaagactctcgtcatcatcacgatcgaaaggataacgaatcaatggtcactgcgggtgacagtaactcaagttttgttgatatatgtaaagaaaacgttccgaatgatagcaagaccgcactcgatactaaatctgtgaaccgcttaaaaagtaatttggctatgagtcccccaagtatacgatatgctccatcaaatttagatggggactacgacacgtcttccacttcctcatctttaccgtcctcatctattagttcagaagatacatcttcctgcagcgattcctcttcgtacactaacgcgtatatggaggccaaccgagagcaggataataaaacaccgatcctgaataaaacgaaatcgtataccaagaaatttacatcctcttcggtaaatatgaattcaccagatggtgcccagagttctggattattactacaagatgagaaggacgatgaggtcgagtgccaactggaacattactataaagatttcagtgatttagatccaaagaggcactatgctattcgtatattcaatactgatgacacttttacgactctctcatgtactccagcgactaccgtcgaagagataatacctgcacttaaaagaaaatttaacattacagcgcaagggaattttcaaatttccctgaaggtgggaaagttgtcaaaaattttgagaccaacttcgaaacctattttaattgaaagaaaacttttacttttgaatggttatcgaaagtcagacccacttcatattatgggtatagaggatttaagttttgtttttaagtttcttttccatcctgtcacaccttctcactttactcctgaacaagaacaaagaataatgagaagcgaatttgttcacgtagatttaaggaatatggatctgactacacctcccatcattttttaccagcatacgtcagaaatagaaagtttagacgtttctaataacgcaaatatattcctacctctggagttcattgaaagctcgattaaattattaagtttgagaatggttaatattagagcatctaaatttccttccaatatcactaaggcgtataaactagtatctttggaattacagagaaacttcataagaaaagtaccgaactcaatcatgaaactgagtaatttaacgatattaaaccttcaatgtaatgagcttgaaagcctaccggctggatttgttgaactgaaaaatctgcaattgctagacttgtcttcaaacaagttcatgcactacccagaagttattaactactgcaccaatcttttacaaatagacctatcatataataaaatccaaagcttaccacagtccactaagtacctagtaaagcttgcgaagatgaacctttctcataacaaactaaattttataggcgacttatcggaaatgacagatttgaggacgctgaacctaagatataacagaatatcatcaattaagacaaatgcgtctaacttgcagaacctttttttaacagataatagaatttcgaactttgaagacactttgccgaaactaagagcccttgaaattcaagagaatccaatcacttctatatccttcaaagatttttatccaaaaaacatgacaagtttgacgttgaacaaggcacagttatcgagtattcctggagaattactcaccaaactatctttcctcgagaaacttgaacttaatcagaataatttgactagactgccacaggagatatccaagttgactaaattagttttcctttcagtggcgagaaacaaactagagtatattccacccgagctatctcaactgaaaagtttgaggacattagatctacattctaacaacataagggactttgttgacggtatggaaaaccttgaactaacatcgctaaatatttcatcgaatgcattcggtaactctagcttagaaaattctttttaccataacatgtcatatgggtcaaagttatctaaaagcctgatgttttttattgctgcagacaatcaatttgatgatgctatgtggcctcttttcaattgctttgtcaatctgaaagtgctaaatctttcttacaacaatttttcagatgtatcgcacatgaaacttgagagcattaccgaattgtacctctccggtaataagctcacgacattgtcgggtgatacagttttgaaatggagctctttaaagactttaatgttgaatagtaaccaaatgttatctctgcctgcagaattatcaaatctctcacagctaagtgtatttgatgttggagcaaatcaattaaagtataatatatcaaactatcattacgattggaactggaggaataataaagaactaaaatatttgaatttttcaggaaatcgaaggtttgaaataaagtcatttataagtcacgatattgatgctgatttgtcagatctgacagtattacctcagttaaaggtactaggtttaatggacgtaactttaaatactaccaaagtaccggatgaaaatgtcaatttccgtttaaggacaactgcatcaataataaatgggatgcgctacggtgttgctgatacattaggtcaaagagactatgtgtcatctcgtgatgttacctttgaaagattccgcggaaatgacgacgaatgcttactatgtcttcatgatagtaaaaaccaaaatgcagattatggccacaatatatcaagaattgttagagatatttacgataaaatactgatcagacaactggaaaggtatggagacgaaacagatgataatataaaaactgcacttcgtttcagttttttgcaactgaataaggagattaacggaatgctaaattctgttgataatggtgccgatgttgccaatctttcatatgcagacttgctaagtggcgcttgctctactgtgatatatatcagagggaagaaactcttcgctgcaaatttaggtgactgtatggctattttatccaaaaacaatggtgactaccaaacgctaaccaaacaacatctcccaacaaagcgggaagaatacgagaggatcagaatatctggcgggtatgtcaacaatggaaaattagatggtgttgtagatgtgtctagagcagtgggtttttttgatttgcttccccacattcatgcttctcccgacatatctgtcgtgacattaacaaaagcagacgagatgcttattgtagcaacgcataagttatgggaatacatggacgtggatacagtttgtgatatcgcgcgtgagaatagtactgatccactccgtgccgcagctgagttgaaggatcatgccatggcttacggctgtacagagaatattacaattttgtgccttgctctttacgagaacattcagcaacaaaatcggttcactttaaataaaaactctttaatgactagaagaagtactttcgaggatactacattaagaagacttcaacctgagatttctccgccaacaggtaacctagcaatggtcttcactgatatcaaaagctcaaccttcttatgggagctattccctaacgcaatgaggaccgcaataaaaactcacaatgacattatgcgtcgtcaactacgaatttacggtggttacgaagtaaagacagaaggagacgcctttatggtggcatttcctacgccaactagtggtctgacatggtgcttaagtgttcaattaaaactcttggatgcacaatggccggaggaaattacctcagttcaagacggctgccaagttacggatagaaatggtaacattatctatcaaggcctatcagttagaatgggtattcattggggctgcccagttccagagcttgatttagtgactcaaagaatggactatttggggccgatggtcaataaggcagcaagggtccagggcgtcgctgacggtggtcagattgcaatgagtagtgatttttactctgaattcaacaagataatgaagtatcatgagcgagtagtgaagggcaaggaatctctcaaggaagtttatggtgaagaaattatcggagaggttcttgaaagagaaattgccatgctggaaagtattggttgggcattttttgactttggcgagcataagctaaagggactcgaaaccaaagaactcgttactattgcgtatcctaagattcttgcttccagacacgaatttgcatctgaagatgagcagtcaaaattaatcaatgaaacgatgttgtttcgtttaagagtcatttcaaacagactggaatctataatgtcagctttaagcggcggatttattgaactagactctcggacggagggaagttatattaaatttaaccctaaagttgaaaatggtattatgcaatcgatttctgagaaggatgcgttgttattttttgatcatgtaattactagaatcgaatccagtgtggcattattacatttacgacaacagaggtgttcaggactggaaatttgcagaaacgataaaacatctgctcgaagcaatattttcaatgttgttgacgaacttttacaaatggttaagaacgcaaaggatttatcaacttga

SEQ ID NO: 86 - protein, 2026 aa, Saccharomyces cerevisiae
MSSKPDTGSEISGPQRQEEQEQQIEQSSPTEANDRSIHDEVPKVKKRHEQNSGHKSRRNSAYSYYSPRSLSMTKSRESITPNGMDDVSISNVEHPRPTEPKIKRGPYLLKKTLSSLSMTSANSTHDDNKDHGYALNSSKTHNYTSTHNHHDGHHDHHHVQFFPNRKPSLAETLFKRFSGSNSHDGNKSGKESKVANLSLSTVNPAPANRKPSKDSTLSNHLADNVPSTLRRKVSSLVRGSSVHDINNGIADKQIRPKAVAQSENTLHSSDVPNSKRSHRKSFLLGSTSSSSSRRGSNVSSMTNSDSASMATSGSHVLQHNVSNVSPTTKSKDSVNSESADHTNNKSEKVTPEYNENIPENSNSDNKREATTPTIETPISCKPSLFRLDTNLEDVTDITKTVPPTAVNSTLNSTHGTETASPKTVIMPEGPRKSVSMADLSVAAAAPNGEFTSTSNDRSQWVAPQSWDVETKRKKTKPKGRSKSRRSSIDADELDPMSPGPPSKKDSRHHHDRKDNESMVTAGDSNSSFVDICKENVPNDSKTALDTKSVNRLKSNLAMSPPSIRYAPSNLDGDYDTSSTSSSLPSSSISSEDTSSCSDSSSYTNAYMEANREQDNKTPILNKTKSYTKKFTSSSVNMNSPDGAQSSGLLLQDEKDDEVECQLEHYYKDFSDLDPKRHYAIRIFNTDDTFTTLSCTPATTVEEIIPALKRKFNITAQGNFQISLKVGKLSKILRPTSKPILIERKLLLLNGYRKSDPLHIMGIEDLSFVFKFLFHPVTPSHFTPEQEQRIMRSEFVHVDLRNMDLTTPPIIFYQHTSEIESLDVSNNANIFLPLEFIESSIKLLSLRMVNIRASKFPSNITKAYKLVSLELQRNFIRKVPNSIMKLSNLTILNLQCNELESLPAGFVELKNLQLLDLSSNKFMHYPEVINYCTNLLQIDLSYNKIQSLPQSTKYLVKLAKMNLSHNKLNFIGDLSEMTDLRTLNLRYNRISSIKTNASNLQNLFLTDNRISNFEDTLPKLRALEIQENPITSISFKDFYPKNMTSLTLNKAQLSSIPGELLTKLSFLEKLELNQNNLTRLPQEISKLTKLVFLSVARNKLEYIPPELSQLKSLRTLDLHSNNIRDFVDGMENLELTSLNISSNAFGNSSLENSFYHNMSYGSKLSKSLMFFIAADNQFDDAMWPLFNCFVNLKVLNLSYNNFSDVSHMKLESITELYLSGNKLTTLSGDTVLKWSSLKTLMLNSNQMLSLPAELSNLSQLSVFDVGANQLKYNISNYHYDWNWRNNKELKYLNFSGNRRFEIKSFISHDIDADLSDLTVLPQLKVLGLMDVTLNTTKVPDENVNFRLRTTASIINGMRYGVADTLGQRDYVSSRDVTFERFRGNDDECLLCLHDSKNQNADYGHNISRIVRDIYDKILIRQLERYGDETDDNIKTALRFSFLQLNKEINGMLNSVDNGADVANLSYADLLSGACSTVIYIRGKKLFAANLGDCMAILSKNNGDYQTLTKQHLPTKREEYERIRISGGYVNNGKLDGVVDVSRAVGFFDLLPHIHASPDISVVTLTKADEMLIVATHKLWEYMDVDTVCDIARENSTDPLRAAAELKDHAMAYGCTENITILCLALYENIQQQNRFTLNKNSLMTRRSTFEDTTLRRLQPEISPPTGNLAMVFTDIKSSTFLWELFPNAMRTAIKTHNDIMRRQLRIYGGYEVKTEGDAFMVAFPTPTSGLTWCLSVQLKLLDAQWPEEITSVQDGCQVTDRNGNIIYQGLSVRMGIHWGCPVPELDLVTQRMDYLGPMVNKAARVQGVADGGQIAMSSDFYSEFNKIMKYHERVVKGKESLKEVYGEEIIGEVLEREIAMLESIGWAFFDFGEHKLKGLETKELVTIAYPKILASRHEFASEDEQSKLINETMLFRLRVISNRLESIMSALSGGFIELDSRTEGSYIKFNPKVENGIMQSISEKDALLFFDHVITRIESSVALLHLRQQRCSGLEICRNDKTSARSNIFNVVDELLQMVKNAKDLST

SEQ ID NO: 87 - DNA, 1860 bp, Saccharomyces cerevisiae
atgatcataagattgcatttttactacctcctcactttagtttaccatttaggacttgtaggtgcgtatgaaaaagcagcaagaaagagaattcaacctcccgatttgatacctggtcctccgggacataaacttggtgatgaaagaccaccgcattacgaccaccggccaccttataaaaaacacatcgacaacattccagcttacaatctgactgatttgatagatgataaactactaaataaatatgaaaactcatgcacggtaaatgtattgacaggtggcttcatctctctagcaagtaattcgtggcacttacgtgcttataattacactttaaattacccatcctttttgatccgatgcgataatggcagtgcaaatcctaatttctctcatgtcttacaagactttgtttatgacatcaacaacaaattcaacgttcaagatgacagtagtaaatacatcggaaaagacccatttcccttaggaatgataatgatcacctttgcttctgggtgtatctgtgtggcaacatggatgctatttttggttgtcttattactgccatccgataatcataatagaagaaataaagttgtacatgtttacgtccttttctctgcgattataagaactgtatttctaaacgagactatagccgtcatatttgacagccaatatcacgatgactaccaggatgcgagccaatttgaatcgttcatcgtagaaactgcaccatataaaatatgtgaattagttgcaaatattttgagtgatataaactggatttatattgttcactacttacagtccaattatggaaaaccaacttggaattggatcccatttaaaatgaaaaaggggacacatatcataattaccgtgggttgcttcctctcactagccgataacattttattcgcaaaccttctttggagaaagaaccttgtagttttgaaggtattttacaagctaatcgaattactgatttacacaattttcatctccattatttgttacttcacatggcataattttgcttacatacttttaccgaaaactgctgaaattaatacggacggtaagtgtaaaacgaaattgagaattctttgggaaaattatcacgaaactataccattattggcgtataatattcttatatttattttattctatttcaccacaatttttttcgctgctttcaccaaacatgttagaggttggacatttaactttgttcatcttttgaaagttttaataacagtgaacgtttggggcttaattggagtattggaaaagagggagctgcacataagcaaaaaaacagtccttggacgaaaaattaacaatagggacaaatttttcgccaatccaacagtcaattattacggagaagatttaggcaagcatttaagcgccataacgttaaacagggatttaaacactactaaaagtaacactacttcccacgattcatcaagtttagtaggatccccttcacccacctggaaatctccaatcgaaagaataagggacagaagaagaagacataagataatgaaaagtgagaataaatttgggcaaaatcccagttttggaagtaaatcgaatggcaaacctaatactaaaacgacattatccaaatatcgacagctattaaggaagcctaggcgaaaaaccaattcatatgaaccaaaaaatggcattggacagaataaagaaggctcaactgttagaccaggagccgacaaacatattagagattccaattatctagctacagacatcagtgacaacgaaagtatggaaaccgaacttcgaaccaaccacatttataattacgaaaatagtgattaa

SEQ ID NO: 88 - protein, 619 aa, Saccharomyces cerevisiae
MIIRLHFYYLLTLVYHLGLVGAYEKAARKRIQPPDLIPGPPGHKLGDERPPHYDHRPPYKKHIDNIPAYNLTDLIDDKLLNKYENSCTVNVLTGGFISLASNSWHLRAYNYTLNYPSFLIRCDNGSANPNFSHVLQDFVYDINNKFNVQDDSSKYIGKDPFPLGMIMITFASGCICVATWMLFLVVLLLPSDNHNRRNKVVHVYVLFSAIIRTVFLNETIAVIFDSQYHDDYQDASQFESFIVETAPYKICELVANILSDINWIYIVHYLQSNYGKPTWNWIPFKMKKGTHIIITVGCFLSLADNILFANLLWRKNLVVLKVFYKLIELLIYTIFISIICYFTWHNFAYILLPKTAEINTDGKCKTKLRILWENYHETIPLLAYNILIFILFYFTTIFFAAFTKHVRGWTFNFVHLLKVLITVNVWGLIGVLEKRELHISKKTVLGRKINNRDKFFANPTVNYYGEDLGKHLSAITLNRDLNTTKSNTTSHDSSSLVGSPSPTWKSPIERIRDRRRRHKIMKSENKFGQNPSFGSKSNGKPNTKTTLSKYRQLLRKPRRKTNSYEPKNGIGQNKEGSTVRPGADKHIRDSNYLATDISDNESMETELRTNHIYNYENSD

SEQ ID NO: 89 - DNA, 1521 bp, Saccharomyces cerevisiae
atgggttccatcaataataacttcaacactaataataacagtaatacggatctcgatcgggactggaaaactgcattgaatattcccaagaaggataccagaccacagacagatgatgtcttaaatacaaagggtaatacttttgaagatttttatttgaaaagagagctgttaatgggtatttttgaagccggttttgaaaaaccatcccctattcaagaagaggctattccggtagcaataactggtagagacatattggccagagcaaagaatggtacaggtaagacagccgcatttgttattcctacgttagagaaagtcaaaccaaagttgaataaaattcaggctttgatcatggttcccacaagagagttagctctgcaaacttcccaagtcgtccgtacattgggaaaacactgtggtatttcatgtatggtgaccactggtggtaccaatttgagagacgatattctaagattaaatgaaacagtccatattttggttggtactcctggtagagtgttggatttagcttcgagaaaagtagcagatctgtctgattgttcattattcatcatggacgaagccgataaaatgttatctcgtgacttcaagacaataattgaacaaatcttatccttcttacctccaactcaccaatctttattatttagcgctactttcccactaacggttaaggaattcatggttaaacatctgcataagccttatgaaattaatttgatggaagaattgactctaaagggtattactcaatactacgcctttgttgaagaaagacaaaagctacattgtttaaatactttattctctaagcttcaaattaatcaagccattattttttgtaattctactaaccgtgtcgaattactagccaagaaaatcactgatttaggctattcctgttattactctcatgcaagaatgaagcaacaagaaagaaataaagttttccacgaatttcgtcaaggtaaggttcgtacattggtctgctccgatttattgacccgtggtatcgatattcaagccgttaatgtcgttatcaatttcgatttccccaaaacggcagaaacatatttacatcgtattggtagatccggtaggtttggccacttgggtttagcaatcaatttgattaactggaatgatcggtttaacctttataaaatcgaacaagaactgggcactgaaattgcggctattccggccactatcgataagtcattgtatgtggctgaaaatgacgaaacggtacctgtcccattcccgatagagcaacagagctatcatcaacaagcgatacctcagcaacaattaccatctcagcaacaatttgctattcctccgcagcaacatcatccacaattcatggttcctccttcgcatcagcaacaacaggcgtatcctccaccgcaaatgccatcgcagcaggggtatcctccacagcaggaacatttcatggcgatgccacctggtcagtcacaaccccagtattaa

SEQ ID NO: 90 - protein, 506 aa, Saccharomyces cerevisiae
MGSINNNFNTNNNSNTDLDRDWKTALNIPKKDTRPQTDDVLNTKGNTFEDFYLKRELLMGIFEAGFEKPSPIQEEAIPVAITGRDILARAKNGTGKTAAFVIPTLEKVKPKLNKIQALIMVPTRELALQTSQVVRTLGKHCGISCMVTTGGTNLRDDILRLNETVHILVGTPGRVLDLASRKVADLSDCSLFIMDEADKMLSRDFKTIIEQILSFLPPTHQSLLFSATFPLTVKEFMVKHLHKPYEINLMEELTLKGITQYYAFVEERQKLHCLNTLFSKLQINQAIIFCNSTNRVELLAKKITDLGYSCYYSHARMKQQERNKVFHEFRQGKVRTLVCSDLLTRGIDIQAVNVVINFDFPKTAETYLHRIGRSGRFGHLGLAINLINWNDRFNLYKIEQELGTEIAAIPATIDKSLYVAENDETVPVPFPIEQQSYHQQAIPQQQLPSQQQFAIPPQQHHPQFMVPPSHQQQQAYPPPQMPSQQGYPPQQEHFMAMPPGQSQPQY

SEQ ID NO: 91 - DNA, 249 bp, Saccharomyces cerevisiae
atgtcaacatatgacgaaatcgaaatcgaagatatgacgtttgagcctgaaaatcaaatgttcacctatccttgtccctgtggagataggtttcaaatatatctggatgacatgtttgagggcgaaaaagttgctgtttgtcccagctgctcactgatgatcgatgtagttttcgataaagaagacttggctgagtactacgaagaggcaggcatccacccccctgagcctattgccgctgctgcctaa

SEQ ID NO: 92 - protein, 82 aa, Saccharomyces cerevisiae
MSTYDEIEIEDMTFEPENQMFTYPCPCGDRFQIYLDDMFEGEKVAVCPSCSLMIDVVFDKEDLAEYYEEAGIHPPEPIAAAA

SEQ ID NO: 93 - DNA, 1923 bp, Saccharomyces cerevisiae
atgtcacctcgacagcttataccgacattaattccggaatgggcaccattatcccagcaatcgtgcataagagaggatgagttagatagtcccccgataacgcctacgagccagacatcttcatttggttcttctttttctcaacagaaaccaacctatagtacaattataggagaaaatatacacacgatcctggatgaaattcgaccatatgtgaaaaaaataactgttagtgaccaagataagaaaactataaaccaatatacgctaggagtctctgcaggaagtggacaatttggttatgtacgaaaagcgtacagttctactttaggcaaggttgttgctgtcaagattataccaaaaaaaccttggaatgcccagcaatattcagtaaatcaagtaatgaggcaaatccagctttggaagagtaaaggaaaaataacgacaaatatgagtggtaatgaggctatgagacttatgaatatcgaaaaatgtaggtgggaaatttttgcggcttcaagacttcgaaataatgttcatattgtgcgactaatagaatgcttggactctcctttcagcgaatctatctggatagtcactaattggtgcagccttggtgaactacagtggaaacgtgacgatgatgaagatattttaccgcaatggaaaaaaattgtgatttcaaattgtagtgtttctacatttgccaaaaaaatcctggaggatatgacaaaagggttggaatatttgcattctcagggttgtattcatcgtgatatcaaaccgtccaatattttattggatgaagaagaaaaagtagcgaaactttctgattttggaagttgtattttcactccccaatcattacctttcagcgatgctaattttgaagattgttttcagagggaattgaacaaaattgttggtactccggcatttattgcaccagagctatgtcatttgggcaattccaaaagagattttgtgacggatggctttaagttggatatttggtcattgggagtgacactatactgcttactgtacaacgagctgccatttttcggggaaaatgaattcgaaacctaccacaaaatcatcgaagtatcattgagttccaaaataaatggtaatactttaaacgatttagtcattaaaaggttattggagaaagacgttactttacgcataagtattcaggatttagtaaaggttttgtcgcgtgaccagcccatagattctaggaatcacagtcaaatttcatcgtccagtgtgaaccccgtaagaaacgaaggtcctgtaagaagattttttggtaggctactgactaaaaaaggaaagaaaaagacctcaggaaaagggaaagacaaggtattggtatctgcaactagtaaagtaacaccttcgatacatatcgacgaggaaccggataaagaatgtttttcgactacggtccttagatcttcgccagactcgagcgattattgttcatcgttaggggaggaagccattcaggttacggatttcttagatactttttgtaggtcaaatgaaagcttacctaatttgactgtgaataatgataagcagaattcggacatgaaaactgacagaagcgagtcatcctctcattcgtcattgaaaatcccaacacctatcaaagccatgataagactaaagagttcccctaaagagaacgggaacagaacccatattaattgctcacaggacaaaccgagttccccactaatggataggactgttggaaagcgcacggttaacaattcaggggctagaaagcttgctcattcaagtaatattctcaactttaaagcatacataaattcggaagatagtgacattcgagaaacagtagaagatgtaaaaacgtatctgaactttgcagataatggtcaaatatag

SEQ ID NO: 94 - protein, 640 aa, Saccharomyces cerevisiae
MSPRQLIPTLIPEWAPLSQQSCIREDELDSPPITPTSQTSSFGSSFSQQKPTYSTIIGENIHTILDEIRPYVKKITVSDQDKKTINQYTLGVSAGSGQFGYVRKAYSSTLGKVVAVKIIPKKPWNAQQYSVNQVMRQIQLWKSKGKITTNMSGNEAMRLMNIEKCRWEIFAASRLRNNVHIVRLIECLDSPFSESIWIVTNWCSLGELQWKRDDDEDILPQWKKIVISNCSVSTFAKKILEDMTKGLEYLHSQGCIHRDIKPSNILLDEEEKVAKLSDFGSCIFTPQSLPFSDANFEDCFQRELNKIVGTPAFIAPELCHLGNSKRDFVTDGFKLDIWSLGVTLYCLLYNELPFFGENEFETYHKIIEVSLSSKINGNTLNDLVIKRLLEKDVTLRISIQDLVKVLSRDQPIDSRNHSQISSSSVNPVRNEGPVRRFFGRLLTKKGKKKTSGKGKDKVLVSATSKVTPSIHIDEEPDKECFSTTVLRSSPDSSDYCSSLGEEAIQVTDFLDTFCRSNESLPNLTVNNDKQNSDMKTDRSESSSHSSLKIPTPIKAMIRLKSSPKENGNRTHINCSQDKPSSPLMDRTVGKRTVNNSGARKLAHSSNILNFKAYINSEDSDIRETVEDVKTYLNFADNGQI

SEQ ID NO: 95 - DNA, 1152 bp, Saccharomyces cerevisiae
atgagtgaaacagaattgagaaaaagacaggcccaattcactagggagttacatggtgatgatattggtaaaaagacaggtttgagtgcattgatgtcgaagaacaactctgcccaaaaggaagccgttcagaagtacttgagaaattgggatggtagaaccgataaagatgccgaagaacgtcgtcttgaggattataatgaagccacacattcctactataacgtcgttacagatttctatgaatatggttggggttcctctttccatttcagcagattttataaaggtgagagtttcgctgcctcgatagcaagacatgaacattatttagcttacaaggctggtattcaaagaggcgatttagttctcgacgttggttgtggtgttgggggcccagcaagagagattgcaagatttaccggttgtaacgtcatcggtctaaacaataacgattaccaaattgccaaggcaaaatattacgctaaaaaatacaatttgagtgaccaaatggactttgtaaagggtgatttcatgaaaatggatttcgaagaaaacactttcgacaaagtttatgcaattgaggccacatgtcacgctccaaaattagaaggtgtatacagcgaaatctacaaggttttgaaaccgggtggtacctttgctgtttacgaatgggtaatgactgataaatatgacgaaaacaatcctgaacatagaaagatcgcttatgaaattgaactaggtgatggtatcccaaagatgttccatgtcgacgtggctaggaaagcattgaagaactgtggtttcgaagtcctcgttagcgaagacctggcggacaatgatgatgaaatcccttggtattacccattaactggtgagtggaagtacgttcaaaacttagctaatttggccacatttttcagaacttcttacttgggtagacaatttactacagcaatggttactgtaatggaaaaattaggtctagccccagaaggttccaaggaagttactgctgctctagaaaatgctgcggttggtttagttgccggtggtaagtccaagttattcactccaatgatgcttttcgtcgctaggaagccagaaaacgccgaaaccccctcccaaacttcccaagaagcaactcaataa

SEQ ID NO: 96 - protein, 383 aa, Saccharomyces cerevisiae
MSETELRKRQAQFTRELHGDDIGKKTGLSALMSKNNSAQKEAVQKYLRNWDGRTDKDAEERRLEDYNEATHSYYNVVTDFYEYGWGSSFHFSRFYKGESFAASIARHEHYLAYKAGIQRGDLVLDVGCGVGGPAREIARFTGCNVIGLNNNDYQIAKAKYYAKKYNLSDQMDFVKGDFMKMDFEENTFDKVYAIEATCHAPKLEGVYSEIYKVLKPGGTFAVYEWVMTDKYDENNPEHRKIAYEIELGDGIPKMFHVDVARKALKNCGFEVLVSEDLADNDDEIPWYYPLTGEWKYVQNLANLATFFRTSYLGRQFTTAMVTVMEKLGLAPEGSKEVTAALENAAVGLVAGGKSKLFTPMMLFVARKPENAETPSQTSQEATQ

SEQ ID NO: 97 - DNA, 2604 bp, Aspergillus nidulans
atgccaggaattctccccatgaaagtgatcaaggtcggcaataacacgcagagtcgtattgcccaagcctgtgaccggtgtcgaagcaaaaagatccgctgcgacggtattcgcccatgctgcacacaatgtgccaacgtcggcttcgagtgcaaaaccagcgataaactcagtcgacgagcgtttccccgtggatacacagagtctctggaagaacgagtacggacactagaagctgaggtcagggaacttaagagtctcctggatgagaaggatgagaagattgatgtgctctctcggatacactctttctcctcaccttcacagcagaagactcctgctgctgtgcactctccgactcagcctcccccggctgctccaacgagtgtgcctacccccagtgagggagccgttcatgttccggatccggttgctttgagcagcacagaggagtccggggtttcgaacacccgtggctttgctgctgtcttcaccaacatgcttgcagaccaaggccggctagctccagaaacttccactaaagctttgtctgcttctcctactcctattactccttctcgtctcgaccagcctctgaaaacaacgcctcggcttgtatcggatcagcttatcaacattttctttcaagaatgggcacctctttacccggttgtccaccgacctaccatcctcaaggcatacgagcaatacctttccaattccgaacacattcaaggcaacaaacatgagatggcccagctgaatctgatctttgctgttgctgcactcggcgctatttcgagaaccaaccaggaccctaccctctttgaggagaattggtcttctattcttgagtcgttacatgccgacatttctatcccaaccttgcagtgttacgtgttggcacaaatgtattgcttgaccaagggtgactacacaaatgttctgcgctatcgtggtgtagctgttggcgtctgccaccaattgaaactacagaagagtcagaaggctttctcatcgaacgctcttcttgctgagaccaggaagaaagttttttggtgccaatatgttctggatcgtctttgcgcttctttgactggtcttcctgttcttcttcgcgaagagcacatccagactgagtatcccgaagatatcgatgatgagaacgtgacggaaaccggtttcttgcccaccttgcccggcgagtccacacgtatctccagcgccctcgccctgttttccgcatctagagttctgaacagcacgttggagaatatctacccgtctgacggtgcatacgaaatcccattgtcaaaaatgcgtttcgttacggaacagctcgataaatgggtcaagagcctacccgctcatcttcacttggagttcacacaggataagccgagcaccaacgtcattagcagtcggtctccacttttgtctgtgatgtattatttcattcgttctctcatccaccgtcctgccgtctgctttggtgacgatcacgttcgttcaccttcagtccttgcgattgcggattccggcaagcatatcatccaaattctccaactgcttgacgagaggcgcctatgtctctctcttagcatcaaccgaagagagctcatcagctccgcagggcttgggcttctctggcaaaatgtcggcctgaagcgtgatagcaaacttgtcaaagaaagtcaaaaggtgcttacaggcgttattgatcagcttgagtctgaatcatccgtggctgcgaccgagttcagtgctctagccggtgccctcgtttcattagataccaaacgaccaacgaccaccaaccctcaacaaatgagcccacccgcccaaaaacccttgaagtctccgaggagacagctggaggcatggaaggcccgcttgatcggcagcactagcccgggtcaatctcagccaaaaccggagcctctgtcacgcagaaacaccttttctggttcgagccctggtttagcggagcgccaattacgttctcctagttgggctagcctacctcccaacgacttcccgcaccatgccccgatgagcaagaacgtttacaaccaccctatggggtatgaaggcaatccgtccatgtcctgctcggtaccgacggaccatccagctccaccatcaggaaatctaacggtctcggactgggagttcgtggtgagcgatatggatcaaggctactcgaatatattcacaggaatctatggtggcaaagaatgcggcgaagatcacggcccttttgcgtctttgactgctgagtacatgcacaaacaaggacccggcctgccgccttctttaacttcaagcgatgaattgcaaggcctgtctccggaggcttggtctgccactagcagtagcgatatggctcaacctccagaacttgcagcacagagtgtctattcggacgggagtctgggaagcagagaccacagcttgtcacttccaagtactatgccttttccgatggaggataggccgggtagcctcttggatccacttcaaggcgttattatccctgctggagacgacgatattgaagaatttgggctggtcaacggttgggatcgacggctggccgtctag

SEQ ID NO: 98 - protein, 867 aa, Aspergillus nidulans
MPGILPMKVIKVGNNTQSRIAQACDRCRSKKIRCDGIRPCCTQCANVGFECKTSDKLSRRAFPRGYTESLEERVRTLEAEVRELKSLLDEKDEKIDVLSRIHSFSSPSQQKTPAAVHSPTQPPPAAPTSVPTPSEGAVHVPDPVALSSTEESGVSNTRGFAAVFTNMLADQGRLAPETSTKALSASPTPITPSRLDQPLKTTPRLVSDQLINIFFQEWAPLYPVVHRPTILKAYEQYLSNSEHIQGNKHEMAQLNLIFAVAALGAISRTNQDPTLFEENWSSILESLHADISIPTLQCYVLAQMYCLTKGDYTNVLRYRGVAVGVCHQLKLQKSQKAFSSNALLAETRKKVFWCQYVLDRLCASLTGLPVLLREEHIQTEYPEDIDDENVTETGFLPTLPGESTRISSALALFSASRVLNSTLENIYPSDGAYEIPLSKMRFVTEQLDKWVKSLPAHLHLEFTQDKPSTNVISSRSPLLSVMYYFIRSLIHRPAVCFGDDHVRSPSVLAIADSGKHIIQILQLLDERRLCLSLSINRRELISSAGLGLLWQNVGLKRDSKLVKESQKVLTGVIDQLESESSVAATEFSALAGALVSLDTKRPTTTNPQQMSPPAQKPLKSPRRQLEAWKARLIGSTSPGQSQPKPEPLSRRNTFSGSSPGLAERQLRSPSWASLPPNDFPHHAPMSKNVYNHPMGYEGNPSMSCSVPTDHPAPPSGNLTVSDWEFVVSDMDQGYSNIFTGIYGGKECGEDHGPFASLTAEYMHKQGPGLPPSLTSSDELQGLSPEAWSATSSSDMAQPPELAAQSVYSDGSLGSRDHSLSLPSTMPFPMEDRPGSLLDPLQGVIIPAGDDDIEEFGLVNGWDRRLAV

SEQ ID NO: 99 - DNA, 1554 bp, Candida albicans
atgtctgacgatcattcaatccattctcatacacagggacttcaccacatcaaaaagaaacgggtcgggaaagcgtgcgattcgtgccggatcaaaaaaaccaagtgtgacggtaaaaaaccttgcaacagatgtacattagacaacaagatttgtgtgttcacggaaaagaaaaaaaccaaagagaagaaacatccatctggttatgttgagcttttagaagcaagattagatatattaactagactgttggaaaaactaattgaattatcacgaccacatttacaatttattgacgatataattaccgaagaaaaactggtcgatcaagaaaaatcttctcctgcttcatcaacaccaaattcatcttctagtgaccaccatgacgatgttgaagaacagaattctactggtgtggttgctcctataaacaaagtagtctcatatctaattaaagaacaaggtctattgaaaaatataccccttgagtgggaacaagggactgagattgctgctaatttcgaccccaatagaaatttaaaactgtcgtcaagattatttgctgaacataaaggtgaagcttttattgggtcaccagtaacgtctcctcaacaaatgccaactagtaacccttttagaagaacctcaatgtttaaagaagaattggaatcaccttctagtgatcattacaatgaactgatattttcccaatcagtcgatgaaccttatatcaagaaggagcccaactcggctcagttttcaaaagggacattttctccacaacaacaacaactacagcaacagcagcaaatgttaaatcagttttccctcaatacttcccgtgatatatcagacatcgaaagtgattcatcaaacaaggaagatggattgaattctggttcggtatctccaccaacatccaactataggtcattttcattgttctctgatagtaatggtgaaccaatattgggcaaaacctcatcattgacgtcattaactaacaagtatgaaaatcattcactttcttcaccacaaaccgccataaacccagtattcaataattcaaccactggtccaatccttaccacattgagacgcaattcatcttcacattctcaaaagacccttggatctatacaacttcaacaaaaacctagaggaagtgttcataaaccagtgcgtaatcattctagagtttcgtcatttgataaacgaatggagtctacagctacagctgcggctactgtcgctgctgtttccggttcagtccaactactgcaaaatacaactccacagaatcttcctcatttggataatagtcaaaacaataattatttaagagacaatggtatgaataatattggtgctggcagtgttggtggtggtttgacttttggtgcacccagttttacacaaccattaagtccatctgatgatgctattgtttatcctacaaatcaatttactaatagaccagctacggtgtccacttttggtggtgggttagatgtgttggtggataattcattggatcctttcttcaatatttaa

SEQ ID NO: 100 - protein, 517 aa, Candida albicans
MSDDHSIHSHTQGLHHIKKKRVGKACDSCRIKKTKCDGKKPCNRCTLDNKICVFTEKKKTKEKKHPSGYVELLEARLDILTRSLEKLIELSRPHLQFIDDIITEEKSVDQEKSSPASSTPNSSSSDHHDDVEEQNSTGVVAPINKVVSYLIKEQGLLKNIPLEWEQGTEIAANFDPNRNLKSSSRLFAEHKGEAFIGSPVTSPQQMPTSNPFRRTSMFKEELESPSSDHYNESIFSQSVDEPYIKKEPNSAQFSKGTFSPQQQQLQQQQQMLNQFSLNTSRDISDIESDSSNKEDGLNSGSVSPPTSNYRSFSLFSDSNGEPILGKTSSLTSLTNKYENHSLSSPQTAINPVFNNSTTGPILTTLRRNSSSHSQKTLGSIQLQQKPRGSVHKPVRNHSRVSSFDKRMESTATAAATVAAVSGSVQLSQNTTPQNLPHLDNSQNNNYLRDNGMNNIGAGSVGGGLTFGAPSFTQPLSPSDDAIVYPTNQFTNRPATVSTFGGGLDVLVDNSLDPFFNI

SEQ ID NO: 101 - DNA, 5631 bp, Saccharomyces cerevisiae
atgaacactgatcaacaaccttatcagggccaaacggactatacccagggaccaggtaacgggcaaagtcaggaacaagactatgaccaatatggccagcctttgtatccttcacaagctgatggttactacgatccaaatgtcgctgctggtactgaagctgatatgtatggtcaacaaccaccaaacgagtcttacgaccaagactacacaaacggtgaatactatggtcaaccgccaaatatggctgctcaagacggtgaaaacttctcggattttagcagttacggccctcctggaacacctggatatgatagctatggtggtcagtataccgcttctcaaatgagttatggagaaccaaattcgtcgggtacctcgactccaatttacggtaattatgacccaaatgctatcgctatggctttgccaaatgaaccttatcccgcttggactgctgactctcaatctcccgtttcgatcgagcaaatcgaagatatctttattgatttgaccaacagactcgggttccaaagagactccatgagaaatatgtttgatcattttatggttctcttggactctaggtcctcgagaatgtctcctgatcaagctttactatctttacatgccgactacattggtggcgatactgctaactataaaaaatggtattttgctgctcagttagatatggatgatgaaattggttttagaaatatgagtcttggaaaactctcaaggaaggcaagaaaagctaagaagaaaaacaagaaagcaatggaagaggccaatcccgaagacactgaagaaactttaaacaaaattgaaggcgacaactccctagaggctgctgattttagatggaaggccaagatgaaccagttgtctcccctggaaagagttcgtcatatcgccttatatctgttatgttggggtgaagctaatcaagtcagattcactgctgaatgtttatgttttatctacaagtgtgctcttgactacttggattcccctctttgccaacaacgccaagaacctatgccagaaggtgatttcttgaatagagtcattacgccaatttatcatttcatcagaaatcaagtttatgaaattgttgatggtcgttttgtcaagcgtgaaagagatcataacaaaattgtcggttatgatgatttaaaccaattgttctggtatccagaaggtattgcaaagattgttcttgaagatggaacaaaattgatagaactcccattggaagaacgttatttaagattaggcgatgtcgtctgggatgatgtattcttcaaaacatataaagagacccgtacttggttacatttggtcaccaacttcaaccgtatttgggttatgcatatctccattttttggatgtactttgcatataattcaccaacattttacactcataactatcaacaattggtcgacaaccaacctttggctgcttacaagtgggcatcttgcgcattaggtggtactgtcgcaagtttgattcaaattgtcgctactttgtgtgaatggtcattcgttccaagaaaatgggctggtgctcaacatctatctcgtagattctggtttttatgcatcatctttggtattaatttgggtcctattatttttgtttttgcttacgacaaagatacagtctactccactgctgcacacgttgttgctgctgttatgttctttgttgcggttgctaccatcatattcttctccattatgccattgggggggttgtttacgtcatatatgaaaaaatctacaaggcgttatgttgcatctcaaacattcactgctgcatttgcccctctacatgggttagatagatggatgtcctatttagtttgggttactgtttttgctgccaaatattcagaatcgtactactttttagttttatctttgagagatccaattagaattttgtccaccactgcaatgaggtgtacaggtgaatactggtggggtgcggtactttgtaaagtgcaacccaagattgtcttaggtttggttatcgctaccgacttcattcttttcttcttggatacctacttatggtacattattgtgaataccattttctctgttgggaaatctttctatttaggtatttctatcttaacaccatggagaaatatcttcacaagattgccaaaaagaatatactccaagattttggctactactgatatggaaattaaatacaaaccaaaggttttgatttctcaagtatggaatgccatcattatttcaatgtacagagaacatctcttagccatcgaccatgtacaaaaattactatatcatcaagttccatctgaaatcgaaggtaaaagaactttgagagctcctaccttctttgtttctcaagatgacaataattttgagactgaatttttccctagggattcagaggctgagcgtcgtatttctttctttgctcaatctttgtctactccaattcccgaaccacttccagttgataacatgccaacgttcacagtattgactcctcactacgcggaaagaattctgctgtcattaagagaaattattcgtgaagatgaccaattttctagagttactcttttagaatatctaaaacaattacatcccgttgaatgggaatgttttgttaaggatactaagattttggctgaagaaaccgctgcctatgaaggaaatgaaaatgaagctgaaaaggaagatgctttgaaatctcaaatcgatgatttgccattttattgtattggttttaaatctgctgctccagaatatacacttcgtacgagaatttgggcttctttgaggtcgcagactctatatcgtaccatttcagggttcatgaattattcaagagctatcaaattactgtatcgtgtggaaaatcctgaaattgttcaaatgtttggtggtaatgctgaaggcttagaaagagagctagaaaagatggcaagaagaaagtttaaatttttggtctctatgcagagattggctaaattcaaaccacatgaactggaaaatgctgagtttttgttgagagcttacccagacttacaaattgcctacttggatgaagagccacctttgactgaaggtgaggagccaagaatctattccgctttgattgatggacattgtgaaattctagataatggtcgtagacgtcccaagtttagagttcaattatctggtaacccaattcttggtgacggtaaatctgataaccaaaaccatgctttgattttttacagaggtgaatacattcaattaattgatgccaaccaagataactacttggaagaatgtctgaagattagatctgtattggctgaatttgaggaattgaacgttgaacaagttaatccatatgctcccggtttaaggtatgaggagcaaacaactaatcatcctgttgctattgttggtgccagagaatacattttctctgaaaactctggtgtgctgggtgatgtggccgctggtaaagaacaaacttttggtacattatttgcgcgtactttatctcaaattggtggtaaattgcattatggtcatccggatttcattaatgctacgtttatgaccactagaggtggtgtttccaaagcacaaaagggtttgcatttaaacgaagatatttatgctggtatgaatgctatgcttcgtggtggtcgtatcaagcattgtgagtattatcaatgtggtaaaggtagagatttgggtttcggtacaattctaaatttcactactaagattggtgctggtatgggtgaacaaatgttatctcgtgaatattattatctgggtacccaattaccagtggaccgtttcctaacattctattatgcccatcctggtttccatttgaacaacttgttcattcaattatctttgcaaatgtttatgttgactttggtgaatttatcttccttggcccatgaatctattatgtgtatttacgataggaacaaaccaaaaacagatgttttggttccaattgggtgttacaacttccaacctgcggttgattgggtgagacgttatacattgtctattttcattgttttctggattgccttcgttcctattgttgttcaagaactaattgaacgtggtctatggaaagccacccaaagatttttctgccacctattatcattatcccctatgttcgaagtgtttgcgggccaaatctactcttctgcgttattaagtgatttagcaattggtggtgctcgttatatatccaccggtcgtggttttgcaacttctcgtataccattttcaattttgtattcaagatttgcaggatctgctatctacatgggtgcaagatcaatgttaatgttgctgttcggtactgtcgcacattggcaagctccactactgtggttttgggcctctctatcttcattaatttttgcgcctttcgttttcaatccacatcagtttgcttgggaagatttctttttggattacagggattatatcagatggttatcaagaggtaataatcaatatcatagaaactcgtggattggttacgtgaggatgtctagggcacgtattactgggtttaaacgtaaactggttggcgatgaatctgagaaagctgctggtgacgcaagcagggctcatagaaccaatttgatcatggctgaaatcataccctgtgcaatttatgcagctggttgttttattgccttcacgtttattaatgctcaaaccggtgtcaagactactgatgatgatagggtgaattctgttttacgtatcatcatttgtaccttggcgccaatcgccgttaacctcggtgttctattcttctgtatgggtatgtcatgctgctctggtcccttatttggtatgtgttgtaagaagacaggttctgtaatggctggaattgcccacggtgttgctgttattgtccacattgcctttttcattgtcatgtgggttttggagagcttcaactttgttagaatgttaatcggagtcgttacttgtatccaatgtcaaagactcatttttcattgcatgacagcgttaatgttgactcgtgaatttaaaaacgatcatgccaatacagccttctggactggtaagtggtatggtaaaggtatgggttacatggcttggacccagccaagtagagaattaaccgccaaggtaattgagctttcagaatttgcagctgattttgttctaggtcatgtgattttaatctgtcaactgccactcattataatcccaaaaatagataaattccactcgattatgctattctggctaaagccctctcgtcaaattcgtcccccaatttactctctgaagcaaactcgtttgcgtaagcgtatggtcaagaagtactgctctttgtactttttagtattggctatttttgcaggatgcattattggtcctgctgtagcctctgctaagatccacaaacacattggagattcattggatggcgttgttcacaatctattccaaccaataaatacaaccaataatgacactggttcccaaatgtcaacttatcaaagtcactactatactcatacgccatcattaaagacctggtcaactataaaataa

SEQ ID NO: 102 - protein, 1876 aa, Saccharomyces cerevisiae
MNTDQQPYQGQTDYTQGPGNGQSQEQDYDQYGQPLYPSQADGYYDPNVAAGTEADMYGQQPPNESYDQDYTNGEYYGQPPNMAAQDGENFSDFSSYGPPGTPGYDSYGGQYTASQMSYGEPNSSGTSTPIYGNYDPNAIAMALPNEPYPAWTADSQSPVSIEQIEDIFIDLTNRLGFQRDSMRNMFDHFMVLLDSRSSRMSPDQALLSLHADYIGGDTANYKKWYFAAQLDMDDEIGFRNMSLGKLSRKARKAKKKNKKAMEEANPEDTEETLNKIEGDNSLEAADFRWKAKMNQLSPLERVRHIALYLLCWGEANQVRFTAECLCFIYKCALDYLDSPLCQQRQEPMPEGDFLNRVITPIYHFIRNQVYEIVDGRFVKRERDHNKIVGYDDLNQLFWYPEGIAKIVLEDGTKLIELPLEERYLRLGDVVWDDVFFKTYKETRTWLHLVTNFNRIWVMHISIFWMYFAYNSPTFYTHNYQQLVDNQPLAAYKWASCALGGTVASLIQIVATLCEWSFVPRKWAGAQHLSRRFWFLCIIFGINLGPIIFVFAYDKDTVYSTAAHVVAAVMFFVAVATIIFFSIMPLGGLFTSYMKKSTRRYVASQTFTAAFAPLHGLDRWMSYLVWVTVFAAKYSESYYFLVLSLRDPIRILSTTAMRCTGEYWWGAVLCKVQPKIVLGLVIATDFILFFLDTYLWYIIVNTIFSVGKSFYLGISILTPWRNIFTRLPKRIYSKILATTDMEIKYKPKVLISQVWNAIIISMYREHLLAIDHVQKLLYHQVPSEIEGKRTLRAPTFFVSQDDNNFETEFFPRDSEAERRISFFAQSLSTPIPEPLPVDNMPTFTVLTPHYAERILLSLREIIREDDQFSRVTLLEYLKQLHPVEWECFVKDTKILAEETAAYEGNENEAEKEDALKSQIDDLPFYCIGFKSAAPEYTLRTRIWASLRSQTLYRTISGFMNYSRAIKLLYRVENPEIVQMFGGNAEGLERELEKMARRKFKFLVSMQRLAKFKPHELENAEFLLRAYPDLQIAYLDEEPPLTEGEEPRIYSALIDGHCEILDNGRRRPKFRVQLSGNPILGDGKSDNQNHALIFYRGEYIQLIDANQDNYLEECLKIRSVLAEFEELNVEQVNPYAPGLRYEEQTTNHPVAIVGAREYIFSENSGVLGDVAAGKEQTFGTLFARTLSQIGGKLHYGHPDFINATFMTTRGGVSKAQKGLHLNEDIYAGMNAMLRGGRIKHCEYYQCGKGRDLGFGTILNFTTKIGAGMGEQMLSREYYYLGTQLPVDRFLTFYYAHPGFHLNNLFIQLSLQMFMLTLVNLSSLAHESIMCIYDRNKPKTDVLVPIGCYNFQPAVDWVRRYTLSIFIVFWIAFVPIVVQELIERGLWKATQRFFCHLLSLSPMFEVFAGQIYSSALLSDLAIGGARYISTGRGFATSRIPFSILYSRFAGSAIYMGARSMLMLLFGTVAHWQAPLLWFWASLSSLIFAPFVFNPHQFAWEDFFLDYRDYIRWLSRGNNQYHRNSWIGYVRMSRARITGFKRKLVGDESEKAAGDASRAHRTNLIMAEIIPCAIYAAGCFIAFTFINAQTGVKTTDDDRVNSVLRIIICTLAPIAVNLGVLFFCMGMSCCSGPLFGMCCKKTGSVMAGIAHGVAVIVHIAFFIVMWVLESFNFVRMLIGVVTCIQCQRLIFHCMTALMLTREFKNDHANTAFWTGKWYGKGMGYMAWTQPSRELTAKVIELSEFAADFVLGHVILICQLPLIIIPKIDKFHSIMLFWLKPSRQIRPPIYSLKQTRLRKRMVKKYCSLYFLVLAIFAGCIIGPAVASAKIHKHIGDSLDGVVHNLFQPINTTNNDTGSQMSTYQSHYYTHTPSLKTWSTIK

SEQ ID NO: 103 - DNA, 4614 bp, Saccharomyces cerevisiae
atgacaatgcctcatcgctatatgtttttggcagtctttacacttctggcactaactagtgtggcctcaggagccacagaggcgtgcttaccagcaggccagaggaaaagtgggatgaatataaatttttaccagtattcattgaaagattcctccacatattcgaatgcagcatatatggcttatggatatgcctcaaaaaccaaactaggttctgtcggaggacaaactgatatctcgattgattataatattccctgtgttagttcatcaggcacatttccttgtcctcaagaagattcctatggaaactggggatgcaaaggaatgggtgcttgttctaatagtcaaggaattgcatactggagtactgatttatttggtttctatactaccccaacaaacgtaaccctagaaatgacaggttattttttaccaccacagacgggttcttacacattcaagtttgctacagttgacgactctgcaattctatcagtaggtggtgcaaccgcgttcaactgttgtgctcaacagcaaccgccgatcacatcaacgaactttaccattgacggtatcaagccatggggtggaagtttgccacctaatatcgaaggaaccgtctatatgtacgctggctactattatccaatgaaggttgtttactcgaacgctgtttcttggggtacacttccaattagtgtgacacttccagatggtaccactgtaagtgatgacttcgaagggtacgtctattcctttgacgatgacctaagtcaatctaactgtactgtccctgacccttcaaattatgctgtcagtaccactacaactacaacggaaccatggaccggtactttcacttctacatctactgaaatgaccaccgtcaccggtaccaacggcgttccaactgacgaaaccgtcattgtcatcagaactccaacaactgctagcaccatcataactacaactgagccatggaacagcacttttacctctacttctaccgaattgaccacagtcactggcaccaatggtgtacgaactgacgaaaccatcattgtaatcagaacaccaacaacagccactactgccataactacaactgagccatggaacagcacttttacctctacttctaccgaattgaccacagtcaccggtaccaatggtttgccaactgatgagaccatcattgtcatcagaacaccaacaacagccactactgccatgactacaactcagccatggaacgacacttttacctctacttctaccgaattgaccacagtcaccggtaccaatggtttgccaactgatgagaccatcattgtcatcagaacaccaacaacagccactactgccatgactacaactcagccatggaacgacacttttacctctacttctaccgaattgaccacagtcaccggtaccaatggtttgccaactgatgagaccatcattgtcatcagaacaccaacaacagccactactgccatgactacaactcagccatggaacgacacttttacctctacatccactgaaatcaccaccgtcaccggtaccaatggtttgccaactgatgagaccatcattgtcatcagaacaccaacaacagccactactgccatgactacacctcagccatggaacgacacttttacctctacatccactgaaatgaccaccgtcaccggtaccaacggtttgccaactgatgaaaccatcattgtcatcagaacaccaacaacagccactactgccataactacaactgagccatggaacagcacttttacctctacatccactgaaatgaccaccgtcaccggtaccaacggtttgccaactgatgaaaccatcattgtcatcagaacaccaacaacagccactactgccataactacaactcagccatggaacgacacttttacctctacatccactgaaatgaccaccgtcaccggtaccaacggtttgccaactgatgaaaccatcattgtcatcagaacaccaacaacagccactactgccatgactacaactcagccatggaacgacacttttacctctacatccactgaaatcaccaccgtcaccggtaccaccggtttgccaactgatgagaccatcattgtcatcagaacaccaacaacagccactactgccatgactacaactcagccatggaacgacacttttacctctacatccactgaaatgaccaccgtcaccggtaccaacggcgttccaactgacgaaaccgtcattgtcatcagaactccaactagtgaaggtctaatcagcaccaccactgaaccatggactggtactttcacctctacatccactgagatgaccaccgtcaccggtactaacggtcaaccaactgacgaaaccgtgattgttatcagaactccaaccagtgaaggtttggttacaaccaccactgaaccatggactggtacttttacttctacatctactgaaatgaccaccattactggaaccaacggcgttccaactgacgaaaccgtcattgtcatcagaactccaaccagtgaaggtctaatcagcaccaccactgaaccatggactggtacttttacttctacatctactgaaatgaccaccattactggaaccaatggtcaaccaactgacgaaaccgttattgttatcagaactccaactagtgaaggtctaatcagcactacaacggaaccatggaccggtactttcacttctacatctactgaaatgacgcacgtcaccggtaccaacggcgttccaactgacgaaaccgtcattgtcatcagaactccaaccagtgaaggtctaatcagcaccaccactgaaccatggactggcactttcacttcgacttccactgaggttaccaccatcactggaaccaacggtcaaccaactgacgaaactgtgattgttatcagaactccaaccagtgaaggtctaatcagcaccaccactgaaccatggactggtactttcacttctacatctactgaaatgaccaccgtcaccggtactaacggtcaaccaactgacgaaaccgtgattgttatcagaactccaaccagtgaaggtttggttacaaccaccactgaaccatggactggtacttttacttcgacttccactgaaatgtctactgtcactggaaccaatggcttgccaactgatgaaactgtcattgttgtcaaaactccaactactgccatctcatccagtttgtcatcatcatcttcaggacaaatcaccagctctatcacgtcttcgcgtccaattattaccccattctatcctagcaatggaacttctgtgatttcttcctcagtaatttcttcctcagtcacttcttctctattcacttcttctccagtcatttcttcctcagtcatttcttcttctacaacaacctccacttctatattttctgaatcatctaaatcatccgtcattccaaccagtagttccacctctggttcttctgagagcgaaacgagttcagctggttctgtctcttcttcctcttttatctcttctgaatcatcaaaatctcctacatattcttcttcatcattaccacttgttaccagtgcgacaacaagccaggaaactgcttcttcattaccacctgctaccactacaaaaacgagcgaacaaaccactttggttaccgtgacatcctgcgagtctcatgtgtgcactgaatccatctcccctgcgattgtttccacagctactgttactgttagcggcgtcacaacagagtataccacatggtgccctatttctactacagagacaacaaagcaaaccaaagggacaacagagcaaaccacagaaacaacaaaacaaaccacggtagttacaatttcttcttgtgaatctgacgtatgctctaagactgcttctccagccattgtatctacaagcactgctactattaacggcgttactacagaatacacaacatggtgtcctatttccaccacagaatcgaggcaacaaacaacgctagttactgttacttcctgcgaatctggtgtgtgttccgaaactgcttcacctgccattgtttcgacggccacggctactgtgaatgatgttgttacggtctatcctacatggaggccacagactgcgaatgaagagtctgtcagctctaaaatgaacagtgctaccggtgagacaacaaccaatactttagctgctgaaacgactaccaatactgtagctgctgagacgattaccaatactggagctgctgagacgaaaacagtagtcacctcttcgctttcaagatctaatcacgctgaaacacagacggcttccgcgaccgatgtgattggtcacagcagtagtgttgtttctgtatccgaaactggcaacaccaagagtctaacaagttccgggttgagtactatgtcgcaacagcctcgtagcacaccagcaagcagcatggtaggatatagtacagcttctttagaaatttcaacgtatgctggcagtgccaacagcttactggccggtagtggtttaagtgtcttcattgcgtccttattgctggcaattatttaa

SEQ ID NO: 104 - protein, 1537 aa, Saccharomyces cerevisiae
MTMPHRYMFLAVFTLLALTSVASGATEACLPAGQRKSGMNINFYQYSLKDSSTYSNAAYMAYGYASKTKLGSVGGQTDISIDYNIPCVSSSGTFPCPQEDSYGNWGCKGMGACSNSQGIAYWSTDLFGFYTTPTNVTLEMTGYFLPPQTGSYTFKFATVDDSAILSVGGATAFNCCAQQQPPITSTNFTIDGIKPWGGSLPPNIEGTVYMYAGYYYPMKVVYSNAVSWGTLPISVTLPDGTTVSDDFEGYVYSFDDDLSQSNCTVPDPSNYAVSTTTTTTEPWTGTFTSTSTEMTTVTGTNGVPTDETVIVIRTPTTASTIITTTEPWNSTFTSTSTELTTVTGTNGVRTDETIIVIRTPTTATTAITTTEPWNSTFTSTSTELTTVTGTNGLPTDETIIVIRTPTTATTAMTTTQPWNDTFTSTSTELTTVTGTNGLPTDETIIVIRTPTTATTAMTTTQPWNDTFTSTSTELTTVTGTNGLPTDETIIVIRTPTTATTAMTTTQPWNDTFTSTSTEITTVTGTNGLPTDETIIVIRTPTTATTAMTTPQPWNDTFTSTSTEMTTVTGTNGLPTDETIIVIRTPTTATTAITTTEPWNSTFTSTSTEMTTVTGTNGLPTDETIIVIRTPTTATTAITTTQPWNDTFTSTSTEMTTVTGTNGLPTDETIIVIRTPTTATTAMTTTQPWNDTFTSTSTEITTVTGTTGLPTDETIIVIRTPTTATTAMTTTQPWNDTFTSTSTEMTTVTGTNGVPTDETVIVIRTPTSEGLISTTTEPWTGTFTSTSTEMTTVTGTNGQPTDETVIVIRTPTSEGLVTTTTEPWTGTFTSTSTEMTTITGTNGVPTDETVIVIRTPTSEGLISTTTEPWTGTFTSTSTEMTTITGTNGQPTDETVIVIRTPTSEGLISTTTEPWTGTFTSTSTEMTHVTGTNGVPTDETVIVIRTPTSEGLISTTTEPWTGTFTSTSTEVTTITGTNGQPTDETVIVIRTPTSEGLISTTTEPWTGTFTSTSTEMTTVTGTNGQPTDETVIVIRTPTSEGLVTTTTEPWTGTFTSTSTEMSTVTGTNGLPTDETVIVVKTPTTAISSSLSSSSSGQITSSITSSRPIITPFYPSNGTSVISSSVISSSVTSSLFTSSPVISSSVISSSTTTSTSIFSESSKSSVIPTSSSTSGSSESETSSAGSVSSSSFISSESSKSPTYSSSSLPLVTSATTSQETASSLPPATTTKTSEQTTLVTVTSCESHVCTESISPAIVSTATVTVSGVTTEYTTWCPISTTETTKQTKGTTEQTTETTKQTTVVTISSCESDVCSKTASPAIVSTSTATINGVTTEYTTWCPISTTESRQQTTLVTVTSCESGVCSETASPAIVSTATATVNDVVTVYPTWRPQTANEESVSSKMNSATGETTTNTLAAETTTNTVAAETITNTGAAETKTVVTSSLSRSNHAETQTASATDVIGHSSSVVSVSETGNTKSLTSSGLSTMSQQPRSTPASSMVGYSTASLEISTYAGSANSLLAGSGLSVFIASLLLAII

SEQ ID NO: 105 - DNA, 3510 bp, Saccharomyces cerevisiae
atgcctgtggctgctcgatatatatttttgaccggcctatttttgctatctgtagctaatgttgctctaggtactacagaggcttgtttgccagctggagagaagaaaaatggtatgactataaacttttaccaatattccttaaaagattcatctacatactcaaatccgtcatatatggcctatggttatgctgatgcagaaaaactgggttctgtaagtgggcaaacaaagctttccatcgattattccatcccatgtaatggcgcatcagatacttgtgcttgttccgatgatgatgctactgaatatagcgcttcccaggttgtaccagtgaagcgtggcgttaaactttgttctgataatacaactctttcttctaaaactgagaaacgtgaaaatgacgattgcgatcaaggcgctgcctactggagttcagatctgttcggattctacacaacacccaccaacgtaaccgtggaaatgacaggttactttttaccaccaaaaactggtacctacacatttggcttcgctactgtggatgattcagcaattttatcggttggaggtaatgttgcctttgaatgttgtaaacaggaacagcctcctatcacatcaacggatttcactattaacggtattaaaccatggaacgcagatgcacctaccgacataaaggggtcaacgtacatgtacgccggttactattacccgatcaaaattgtttattcaaatgctgtatcctggggtacgcttcctgttagtgtggtattgccagatggtactgaggttaatgatgattttgaaggatatgttttttcttttgacgataatgctactcaagctcactgttccgttccaaaccctgctgagcatgcaagaacttgtgtatcatctgcaacatcttcctggtcgtccagtgaagtctgtacagagtgtaccgagaccgagtctaccagttatgtgacaccatatgtcactagctcttcctggtcgtccagtgaagtctgtacagagtgcaccgagaccgagtctactagcacctctactccatatgtcaccagctcttcctcgtcgtccagtgaagtctgtacggagtgcaccgaaactgagtctaccagttatgtgacaccatatgtcagctcgtctactgctgccgcaaactacactagctcattctcatcgtccagtgaagtctgtacagagtgcaccgaaactgagtctactagcacctctactccatatgtcactagctcttcctggtcgtccagtgaagtctgtacagagtgcaccgagaccgagtctaccagttatgtgacaccatatgtcagctcgtctactgctgccgcaaactacactagctcattctcatcgtccagtgaagtctgtacagagtgcaccgaaactgagtctactagcacctctactccatatgtcactagctcttcctcgtcgtccagtgaagtctgtacagagtgcaccgagaccgagtctaccagttatgtgacaccatatgtcagctcgtctactgctgccgcaaactacactagctctttctcatcgtccagtgaagtctgtacagagtgcaccgaaaccgagtctactagcacctctactccatatgtcaccagctcttcctggtcgtccagtgaagtctgtacagagtgcaccgagaccgagtctaccagttatgtgacaccatatgtcagctcgtctactgctgccgcaaactacactagctcattctcatcgtccagtgaagtctgtacagagtgcaccgaaaccgagtctacaagcacatccactccatatgcaacctcatctactggcacagctacttcatttaccgcttcaacttccaataccatgacgtctttggtccaaacagacacaaccgtttctttcagcctatcttcaactgtaagcgagcataccaacgctccaacttcatctgtagagtcaaatgctagtactttcatatcgtcaaataaaggcagcgttaaaagttatgttacgtcatccatacatagcattacgcccatgtatcctagtaaccaaaccgtaacatctagctctgttgtctccacaccaattacttccgaatcttctgaatcctcggcctcagttaccattctaccctcaactatcacttctgaattcaaaccatctacaatgaaaacgaaggtcgttagtatctcctcatcaccaactaatttgattaccagctatgacactacatctaaggattcaactgttggttcatccacatcgtctgtaagcctgatctctagtatttctctaccaagtagttattcagcttctagcgaacaaatatttcacagctccatcgttagttcaaacggtcaagcattaacaagtttttcttcgaccaaagtcagttcctcagaatcttctgaatcacatagaacatcgcccactacatccagtgaatcaggcatcaaatcttcaggcgttgaaatcgaatctacaagtacctcttctttcagctttcacgaaacttctacagcctccacctccgttcaaatatcttctcagtttgtgactccatcctcccctatttccacagttgcccctcgttctacagggctcaatagtcaaactgaaagtacaaattcttccaaggaaaccatgtcgtctgaaaatagcgccagcgttatgccttcttcatcagctacatctcccaaaacaggcaaagttaccagtgatgaaacttcttccggattttctcgtgatcgcaccactgtgtataggatgacttcagaaacaccctccacaaatgaacaaacaactttgattactgtaagttcttgtgaatcaaatagctgctcaaacacagtctcaagtgctgtagtttccacggccaccactaccatcaatgggattaccactgaatatactacatggtgccctctttctgctacggaattaacaacggtaagtaaattagagtcagaagaaaaaaccaccctaattacggttacttcttgtgagtctggtgtctgttccgaaactgcttcacctgctatcgtttcgacagccactgctaccgtcaatgatgtcgttacagtttattccacatggagcccacaggctacaaataaactagcggttagttctgacatcgaaaatagtgccagtaaggcttcattcgtttcagaggctgctgagacaaaatccataagcagaaacaacaattttgttccaacttctgggactacttctattgaaacacatacaaccactacaagcaacgcgtctgaaaatagcgacaatgtttctgcttctgaggctgtcagtagcaaaagtgtcacaaatcccgtgttgattagtgtatctcaacagcctcgtggcacaccagcaagtagtatgataggatctagtacagcctctttagagatgtcaagctacctcggcattgcaaatcatctactaaccaatagtggtattagtattttcattgcctccctattactggcaatcgtttaa

SEQ ID NO: 106 - protein, 1169 aa, Saccharomyces cerevisiae
MPVAARYIFLTGLFLLSVANVALGTTEACLPAGEKKNGMTINFYQYSLKDSSTYSNPSYMAYGYADAEKLGSVSGQTKLSIDYSIPCNGASDTCACSDDDATEYSASQVVPVKRGVKLCSDNTTLSSKTEKRENDDCDQGAAYWSSDLFGFYTTPTNVTVEMTGYFLPPKTGTYTFGFATVDDSAILSVGGNVAFECCKQEQPPITSTDFTINGIKPWNADAPTDIKGSTYMYAGYYYPIKIVYSNAVSWGTLPVSVVLPDGTEVNDDFEGYVFSFDDNATQAHCSVPNPAEHARTCVSSATSSWSSSEVCTECTETESTSYVTPYVTSSSWSSSEVCTECTETESTSTSTPYVTSSSSSSSEVCTECTETESTSYVTPYVSSSTAAANYTSSFSSSSEVCTECTETESTSTSTPYVTSSSWSSSEVCTECTETESTSYVTPYVSSSTAAANYTSSFSSSSEVCTECTETESTSTSTPYVTSSSSSSSEVCTECTETESTSYVTPYVSSSTAAANYTSSFSSSSEVCTECTETESTSTSTPYVTSSSWSSSEVCTECTETESTSYVTPYVSSSTAAANYTSSFSSSSEVCTECTETESTSTSTPYATSSTGTATSFTASTSNTMTSLVQTDTTVSFSLSSTVSEHTNAPTSSVESNASTFISSNKGSVKSYVTSSIHSITPMYPSNQTVTSSSVVSTPITSESSESSASVTILPSTITSEFKPSTMKTKVVSISSSPTNLITSYDTTSKDSTVGSSTSSVSLISSISLPSSYSASSEQIFHSSIVSSNGQALTSFSSTKVSSSESSESHRTSPTTSSESGIKSSGVEIESTSTSSFSFHETSTASTSVQISSQFVTPSSPISTVAPRSTGLNSQTESTNSSKETMSSENSASVMPSSSATSPKTGKVTSDETSSGFSRDRTTVYRMTSETPSTNEQTTLITVSSCESNSCSNTVSSAVVSTATTTINGITTEYTTWCPLSATELTTVSKLESEEKTTLITVTSCESGVCSETASPAIVSTATATVNDVVTVYSTWSPQATNKLAVSSDIENSASKASFVSEAAETKSISRNNNFVPTSGTTSIETHTTTTSNASENSDNVSASEAVSSKSVTNPVLISVSQQPRGTPASSMIGSSTASLEMSSYLGIANHLLTNSGISIFIASLLLAIV

SEQ ID NO: 107 - DNA, 4104 bp, Saccharomyces cerevisiae
atgcaaagaccatttctactcgcttatttggtcctttcgcttctatttaactcggctttgggttttccaactgcactagttccaagaggatcctccgaaggaactagctgtaattctatcgttaatggctgtcccaacttagacttcaattggcacatggaccagcaaaatatcatgcagtatactttggatgtgacttccgtttcttgggttcaagacaacacataccaaatcactattcatgtcaaaggtaaagaaaatattgacctgaagtatctatggtctttgaaaatcattggtgtcactggtccaaaaggtaccgtccaactatacggttacaacgaaaatacctatttgattgacaacccaactgatttcacagccacttttgaagtttatgccacacaagatgtcaacagctgtcaggtgtggatgcctaacttccaaattcaattcgagtatttgcaaggtagtgccgctcaatatgcaagctcctggcaatggggaactacatcttttgatttgtctactggttgtaacaactatgacaatcaaggccactctcaaacggatttcccaggcttctattggaacatagattgtgacaataattgtggcggtacgaagtcatctaccactacatctagcacttccgagtcatctaccactacatctagcacttccgagtcatctaccactacatctagcacttccgagtcatctaccactacatctagcacttccgagtcatctacatcatcatcaaccaccgctcctgctacaccaaccactacctcatgcactaaggaaaagcctacacccccaaccactacctcatgcacaaaggaaaagcctacacctcctcatcacgacaccactccatgtacaaagaagaaaactaccacatctaagacatgcactaagaagactactactccagtaccaaccccatcaagctctactactgaaagttcttctgctccagtaccaactccatccagctctactactgaaagctcttctgctccagtaaccagctctaccactgaaagctcttctgctccagtaccaaccccatcaagctctactactgaaagctcttctgctccagtaaccagctctaccactgaaagctcttctgctccagtaaccagctctaccactgaaagctcttctgctccagtaccaactccatccagctctactactgaaagctcttctgctccagtaaccagctctaccactgaaagctcttctgctccagtaaccagctctaccactgaaagctcttctgctccagtaaccagctctaccactgaaagctcttctgctccagtaaccagctctaccactgaaagctcttctgctccagtaccaactccatccagctctactactgaaagctcttctgctccagtaaccagctctaccactgaaagctcttctgctccagtaccaactccatccagctctactactgaaagctcttctgctccagtaaccagctctaccactgaaagctcttctgctccagtaccaactccatccagctctactactgaaagctcttctgctccagctccaaccccatcaagctccaccactgaaagctcttctgctccagtaaccagctctaccactgaaagctcttctgctccagtaccaactccatccagctctactactgaaagctcttctactccagtaaccagctccaccactgaaagctcttctgctccagtgccaactccatcaagctctactactgaaagctcttctgctccagtaccaactccatcaagctctactactgaaagctcttctgctccagctccaaccccatcaagctctactactgaaagctcttctgctccagtaaccagctctaccactgaaagctcttctgctccagtaccaactccatccagctctactactgaaagctcttctgctccagtaccaaccccatccagctctactactgaaagctcttctgctccagtaccaactccatccagctctactactgaaagctcttctgctccagtaaccagctctaccactgaaagctcttctgctccagtaaccagctctaccactgaaagctcttctgctccagtaccaactccatccagctctactactgaaagctcttctgctccagtaccaactccatccagctctactactgaaagctcttctgctccagtaccaactccatccagctctactactgaaagctcttctgctccagtaaccagctctaccactgaaagctcttctgctccagtaccaactccatccagctctactactgaaagctcttctgctccagtgccaactccatccagctctactaccgaaagctcttctgctccagtaccaaccccatcaagctctactactgaaagctctgtagcaccagtaccaaccccatcttcctctagcaacatcacttcctccgctccatcttcaaccccattcagctctagcactgaaagctcttctgttccagtaccaaccccatcaagctctactactgaaagctcttctgctccagtatccagctccaccactgaaagctctgtagcaccagtaccaaccccatcttcctctagcaacatcacttcctccgctccatcttcaattccattcagctctactactgaaagcttttctactggcactactgtcactccatcatcatccaaataccctggcagtcaaacagaaacctctgtttcttctacaaccgaaactaccattgttccaactaaaactacgacttctgtcactacaccatcaacaaccactattaccactacggtttgctctacaggaacaaactctgccggtgaaactacctctggatgctctccaaagaccgttacaactactgttccaactacaactacgacttctgtcactacatcatcaacaaccactattactactacagtttgctctacaggaacaaactctgccggtgaaactacctctggatgctctccaaagaccattacaactactgttccatgttcaaccagtccaagcgaaaccgcctcggaatcaacaaccacttcacctaccacacctgtaactacagttgtctcaaccaccgtcgttactactgagtattctactagtacaaaaccaggtggtgaaattacaactacatttgtcaccaaaaacattccaaccacttacctaaccacaattgctccaactccatcagtcactacggttaccaatttcaccccaaccactattactactacggtttgctctacaggtacaaactctgccggtgaaactacctctggatgctctccaaagactgtcacaaccactgttccttgttcaactggtactggcgaatacactactgaagctaccacccttgttacaacagctgtcacaaccaccgttgttaccactgaatcctctacgggtactaactccgctggtaagacgacaactggttacacaacaaagtctgtaccaaccacctatgtaaccactttggctccaagtgcaccagtaactcctgccactaatgccgtaccaactacaataaccactactgaatgttctgctgctacaaacgctgccggtgaaactacatctgtatgctctgctaagactatcgtaagttctgcaagcgcaggcgaaaacactgcaccttcggctaccacccctgtcacgacggctattccaaccacagttattaccactgagtcatctgttggtactaactccgctggcgaaacaacaactggttacacaaccaagtccatcccaaccacttacataaccactttgattccaggttcaaatggtgccaagaattacgaaactgtggccacagcaaccaaccctatttcaatcaagactacatcccaactagctacaacagcttctgcttctagcgtggctcccgttgtcacatctccatctctaactggtccactacaatctgcttctggttctgcagtcgctacatactctgttccttctatctcgagtacttaccaaggtgctgctaatatcaaggttcttggaaactttatgtggttgctactcgctcttccagttgtattctaa

SEQ ID NO: 108 - protein, 1367 aa, Saccharomyces cerevisiae
MQRPFLLAYLVLSLLFNSALGFPTALVPRGSSEGTSCNSIVNGCPNLDFNWHMDQQNIMQYTLDVTSVSWVQDNTYQITIHVKGKENIDLKYLWSLKIIGVTGPKGTVQLYGYNENTYLIDNPTDFTATFEVYATQDVNSCQVWMPNFQIQFEYLQGSAAQYASSWQWGTTSFDLSTGCNNYDNQGHSQTDFPGFYWNIDCDNNCGGTKSSTTTSSTSESSTTTSSTSESSTTTSSTSESSTTTSSTSESSTSSSTTAPATPTTTSCTKEKPTPPTTTSCTKEKPTPPHHDTTPCTKKKTTTSKTCTKKTTTPVPTPSSSTTESSSAPVPTPSSSTTESSSAPVTSSTTESSSAPVPTPSSSTTESSSAPVTSSTTESSSAPVTSSTTESSSAPVPTPSSSTTESSSAPVTSSTTESSSAPVTSSTTESSSAPVTSSTTESSSAPVTSSTTESSSAPVPTPSSSTTESSSAPVTSSTTESSSAPVPTPSSSTTESSSAPVTSSTTESSSAPVPTPSSSTTESSSAPAPTPSSSTTESSSAPVTSSTTESSSAPVPTPSSSTTESSSTPVTSSTTESSSAPVPTPSSSTTESSSAPVPTPSSSTTESSSAPAPTPSSSTTESSSAPVTSSTTESSSAPVPTPSSSTTESSSAPVPTPSSSTTESSSAPVPTPSSSTTESSSAPVTSSTTESSSAPVTSSTTESSSAPVPTPSSSTTESSSAPVPTPSSSTTESSSAPVPTPSSSTTESSSAPVTSSTTESSSAPVPTPSSSTTESSSAPVPTPSSSTTESSSAPVPTPSSSTTESSVAPVPTPSSSSNITSSAPSSTPFSSSTESSSVPVPTPSSSTTESSSAPVSSSTTESSVAPVPTPSSSSNITSSAPSSIPFSSTTESFSTGTTVTPSSSKYPGSQTETSVSSTTETTIVPTKTTTSVTTPSTTTITTTVCSTGTNSAGETTSGCSPKTVTTTVPTTTTTSVTTSSTTTITTTVCSTGTNSAGETTSGCSPKTITTTVPCSTSPSETASESTTTSPTTPVTTVVSTTVVTTEYSTSTKPGGEITTTFVTKNIPTTYLTTIAPTPSVTTVTNFTPTTITTTVCSTGTNSAGETTSGCSPKTVTTTVPCSTGTGEYTTEATTLVTTAVTTTVVTTESSTGTNSAGKTTTGYTTKSVPTTYVTTLAPSAPVTPATNAVPTTITTTECSAATNAAGETTSVCSAKTIVSSASAGENTAPSATTPVTTAIPTTVITTESSVGTNSAGETTTGYTTKSIPTTYITTLIPGSNGAKNYETVATATNPISIKTTSQLATTASASSVAPVVTSPSLTGPLQSASGSAVATYSVPSISSTYQGAANIKVLGNFMWLLLALPVVF

SEQ ID NO: 109 - DNA, 3228 bp, Saccharomyces cerevisiae
atgacaattgcacaccactgcatatttttggtaatcttggcctttctggcactaattaatgtggcctcaggagccacagaggcgtgcttaccagcaggccagaggaaaagtgggatgaatataaatttttaccagtattcattgaaagattcctccacatattcgaatgcagcatatatggcttatggatatgcctcaaaaaccaaactaggttctgtcggaggacaaactgatatttcgattgattataatattccctgtgttagttcatcaggcacatttccttgtcctcaagaagattcctatggaaactggggatgcaaaggaatgggtgcttgttctaatagtcaaggaattgcatactggagtactgatttatttggtttctatactaccccaacaaacgtaaccctagaaatgacaggttattttttaccaccacagacgggttcttacacgttttcttttgcaacagtagatgattctgcaattttatcagtcggtggtagcattgcgttcgaatgttgtgcacaagaacaacctcccatcacgtcgactaacttcacaatcaatggtatcaagccatgggatggaagtctccctgacaatatcacagggactgtctacatgtatgcaggctactattatccgctgaaggttgtttactccaatgccgtttcctggggcacgcttccaattagcgtggaattgcctgatggtactactgttagtgataactttgaagggtacgtttactcttttgacgatgacctaagtcagtcaaattgtactatccctgatccttcaatacatactactagcactatcacaactaccaccgagccatggaccggtactttcacttctacatccactgagatgaccaccatcaccgatactaacggtcaattaactgatgaaactgtcattgtcatcagaactccaacaacagctagcaccatcacaactaccaccgagccatggaccggtactttcacctctacatccactgagatgactactgtcaccggtaccaacggtcaaccaactgacgaaactgttattgtcattagaactccaactagtgagggtttgattactacaactaccgaaccatggaccggtactttcacctctacatccactgagatgactactgtgaccggtaccaacggtcaaccaactgacgaaactgttattgtcattagaactccaactagtgagggtttgattactacaactaccgaaccatggaccggtactttcacctctacatccactgaggttaccaccatcactggtaccaacggtcaaccaactgacgaaaccgtgattgtcattagaactccaactagtgagggtttgattactacaactaccgaaccatggaccggtactttcacctctacatctactgagatgactactgtcaccggtaccaacggtcaaccaactgacgaaactgttattgttatcagaactccaaccagtgaaggtctaatcagcaccaccactgaaccatggactggtactttcacctctacatctactgaggttaccaccatcactggtaccaacggtcaaccaactgacgaaaccgtgattgtcattagaactccaactagtgagggtttgattactacaactaccgaaccatggaccggaactttcacctctacatccactgagatgactactgtgaccggtaccaacggtcaaccaactgacgaaactgttattgtcattagaactccaactagtgagggtttgattactagaactaccgaaccatggactggtactttcacttctacatctactgaggttaccaccatcaccggtaccaacggtcaaccaactgacgaaactgttattgtcatcagaactccaactactgccatctcatccagtttgtcatcttcttcaggacaaatcaccagctctatcacgtcttcgcgtccaattattaccccattctatcctagcaatggaacttctgtgatttcctcctcagtaatttcttcttcagtcacttcttctctagtcacctcttcttcattcatttcttcctctgtcatttcttcttctacaacaacctccacttctatattctctgaatcatctacatcatccgtcattccaaccagtagttccacctctggttcttctgagagcaaaacgagttcggctagttcttcctcttcttcctcttctatctcttctgaatcaccaaagtctcctacaaattcttcttcatcattaccacctgttaccagtgcgacaacaggccaggaaactgcttcttcattaccacctgctaccactacaaaaacgagcgaacaaaccactttggttaccgtgacatcctgcgaatctcatgtgtgtactgaatccatctcctctgctattgtttccacggccaccgttactgttagcggcgtcacaacagagtataccacgtggtgccctatttctaccacagagacaacaaagcaaaccaaggggacaacagagcaaaccaaggggacaacagagcaaaccacagaaacaacaaaacaaaccacagtagttacaatttcttcttgtgaatctgacatatgctctaagactgcttctccagccattgtgtctacaagcactgctactattaacggcgttaccacagaatacacaacatggtgtcctatttccaccacagaatcgaagcaacaaactacgctagttactgttacttcctgcgaatctggtgtgtgttccgaaactacttcacctgccattgtttcgacggccacggctactgtgaatgatgttgttacggtctatcctacatggagaccacagactacgaatgaacagtctgtcagctctaaaatgaacagtgctaccagtgagacaactaccaatactggggctgctgagacaaaaacagcagtcacctcttcactttcaagattcaatcacgctgaaacacagacagcttccgcgaccgatgtgattggtcacagcagtagtgttgtttctgtatccgaaactggcaacaccatgagtctaacaagttccgggttgagcactatgtcgcaacagcctcgtagcacaccagcaagtagcatggtaggatctagtacagcttctttagaaatttcaacgtatgctggcagtgccaacagcttactggccggtagtggtttaagtgtcttcattgcgtccttattgctggcaattatttaa

SEQ ID NO: 110 - protein, 1075 aa, Saccharomyces cerevisiae
MTIAHHCIFLVILAFLALINVASGATEACLPAGQRKSGMNINFYQYSLKDSSTYSNAAYMAYGYASKTKLGSVGGQTDISIDYNIPCVSSSGTFPCPQEDSYGNWGCKGMGACSNSQGIAYWSTDLFGFYTTPTNVTLEMTGYFLPPQTGSYTFSFATVDDSAILSVGGSIAFECCAQEQPPITSTNFTINGIKPWDGSLPDNITGTVYMYAGYYYPLKVVYSNAVSWGTLPISVELPDGTTVSDNFEGYVYSFDDDLSQSNCTIPDPSIHTTSTITTTTEPWTGTFTSTSTEMTTITDTNGQLTDETVIVIRTPTTASTITTTTEPWTGTFTSTSTEMTTVTGTNGQPTDETVIVIRTPTSEGLITTTTEPWTGTFTSTSTEMTTVTGTNGQPTDETVIVIRTPTSEGLITTTTEPWTGTFTSTSTEVTTITGTNGQPTDETVIVIRTPTSEGLITTTTEPWTGTFTSTSTEMTTVTGTNGQPTDETVIVIRTPTSEGLISTTTEPWTGTFTSTSTEVTTITGTNGQPTDETVIVIRTPTSEGLITTTTEPWTGTFTSTSTEMTTVTGTNGQPTDETVIVIRTPTSEGLITRTTEPWTGTFTSTSTEVTTITGTNGQPTDETVIVIRTPTTAISSSLSSSSGQITSSITSSRPIITPFYPSNGTSVISSSVISSSVTSSLVTSSSFISSSVISSSTTTSTSIFSESSTSSVIPTSSSTSGSSESKTSSASSSSSSSSISSESPKSPTNSSSSLPPVTSATTGQETASSLPPATTTKTSEQTTLVTVTSCESHVCTESISSAIVSTATVTVSGVTTEYTTWCPISTTETTKQTKGTTEQTKGTTEQTTETTKQTTVVTISSCESDICSKTASPAIVSTSTATINGVTTEYTTWCPISTTESKQQTTLVTVTSCESGVCSETTSPAIVSTATATVNDVVTVYPTWRPQTTNEQSVSSKMNSATSETTTNTGAAETKTAVTSSLSRFNHAETQTASATDVIGHSSSVVSVSETGNTMSLTSSGLSTMSQQPRSTPASSMVGSSTASLEISTYAGSANSLLAGSGLSVFIASLLLAII

SEQ ID NO: 111 - DNA, 1785 bp, Saccharomyces cerevisiae
atgcacttggctgctatgatgctaggaaatcctatggcacctgcggttcaaatgcgcaatgttaatatgaaccctataccaattcctatggttggtaaccctatcgttaataatttttccattccaccatacaataatgcaaaccccacgactggtgcaactgctgttgctcccacagcgccgccttccggcgattttacaaatgtagggccaacccagaatcggagtcaaaacgttactggctggccagtctataattatccaatgcaacccactacggaaaatccagtgggaaacccgtgtaacaataataccacaaataatacaactaataacaaatctccagtgaaccaacctaaaagtttaaaaactatgcattcaacagataaaccaaataatgtcccgacgtcaaaatctacaagaagtagatctgcaacctcaaaagcgaagggtaaagttaaagccggtctagtggctaagagacgaagaaaaaataataccgctacagtttccgcgggatcgacgaacgcttgttcgccaaatattaccacaccaggctcaacaacaagtgaacccgctatggtaggttcaagagtaaataagactccaagatcagatattgctactaacttccgcaatcaagcaataatatttggcgaggaagatatttattctaattccaaatctagcccatcgttggatggagcatcaccttccgctttagcttctaaacagcccacaaaggtaaggaaaaatacaaaaaaggcatccacctcagcttttccagtagagtctacgaataaactcggtggcaacagcgtggtgacaggtaaaaagcgcagtccccctaacactagagtgtcgaggaggaaatccactccttctgttattctgaatgctgatgccactaaggatgagaataatatgttaagaacattctcgaatactattgctccgaatattcattccgctccgcccactaaaactgcgaattctctcccttttccaggtataaatttgggaagtttcaacaagccggctgtatccagtccattatcttcagtgacagagagttgcttcgatccagaaagtggcaagattgccggaaagaatggacccaagcgagcagtaaactcaaaagtttcggcatcatccccattaagcatagcaacacctcggtctggtgacgctcagaagcaaagaagttctaaggtaccaggaaacgtggttataaagccgccacatgggttttcaaccaccaatttgaatattactttaaagaactctaaaataatcacttcacagaataatacagtatcccaagaattgccgaatgggggaaacatactggaggcgcaagtaggcaatgattcaagaagtagtaaaggcaatcgtaacacattatctactccagaggaaaaaaagccgagtagtaataatcaaggatatgattttgacgccctcaaaaattcaagttctttgttgtttcctaatcaagcttatgcttctaacaatagaacaccaaacgagaattcaaatgttgctgatgaaacctctgcatctacaaatagtggcgataatgataacacattaattcagccctcatccaatgtgggtacaactttgggtcctcagcaaaccagtactaatgaaaatcagaatgtacactctcagaacttgaagtttgggaatattggtatggttgaagaccaaggaccggattacgatctcaatttactggatacaaatgaaaatgatttcaattttattaattgggaaggctga

SEQ ID NO: 112 - protein, 594 aa, Saccharomyces cerevisiae
MHLAAMMLGNPMAPAVQMRNVNMNPIPIPMVGNPIVNNFSIPPYNNANPTTGATAVAPTAPPSGDFTNVGPTQNRSQNVTGWPVYNYPMQPTTENPVGNPCNNNTTNNTTNNKSPVNQPKSLKTMHSTDKPNNVPTSKSTRSRSATSKAKGKVKAGLVAKRRRKNNTATVSAGSTNACSPNITTPGSTTSEPAMVGSRVNKTPRSDIATNFRNQAIIFGEEDIYSNSKSSPSLDGASPSALASKQPTKVRKNTKKASTSAFPVESTNKLGGNSVVTGKKRSPPNTRVSRRKSTPSVILNADATKDENNMLRTFSNTIAPNIHSAPPTKTANSLPFPGINLGSFNKPAVSSPLSSVTESCFDPESGKIAGKNGPKRAVNSKVSASSPLSIATPRSGDAQKQRSSKVPGNVVIKPPHGFSTTNLNITLKNSKIITSQNNTVSQELPNGGNILEAQVGNDSRSSKGNRNTLSTPEEKKPSSNNQGYDFDALKNSSSLLFPNQAYASNNRTPNENSNVADETSASTNSGDNDNTLIQPSSNVGTTLGPQQTSTNENQNVHSQNLKFGNIGMVEDQGPDYDLNLLDTNENDFNFINWEG

SEQ ID NO: 113 - DNA, 3969 bp, Saccharomyces cerevisiae
atgtctctggcacattattgtttactactagccatcgtcacattgctgggattaactaatgttgtctctgcgactacagcggcatgcctgccagcaaactcaaggaagaatggtatgaatgtaaacttttaccagtattcattgagagattcctccacatattcgaatgcagcatatatggcttatggatatgcctcaaaaactaaactgggttctgtcggaggacaaactgatatctcgattgattataatattccttgtgttagttcatcaggcacatttccttgtcctcaagaagatttatatggtaattggggatgcaaaggaattggtgcttgttctaataatccaataattgcatactggagtactgatttatttggtttctatactaccccaacaaacgtaaccctagaaatgacaggttattttttaccaccacagacgggttcttacacattcaagtttgctacagttgacgactctgcaattctatcagtcggtggtagcattgcgttcgaatgttgtgcacaagaacaacctcccatcacgtcgactaacttcaccatcaatggtatcaagccatggaatggaagtccccctgataatattacagggactgtctacatgtatgctggtttctattatccaatgaagattgtttactcaaatgccgttgcctggggtacacttccaattagtgtgacactaccagatggcactaccgttagtgatgactttgaagggtacgtatatacttttgacaacaatctaagccagccaaactgtaccattccagacccttcaaattatactgtcagtactaccataactacaacggaaccatggaccggtactttcacttctacatctactgaaatgaccaccgtcaccggtaccaacggcgttccaactgacgaaaccgtcattgtcatcagaactccaacaactgctagcaccatcataactacaactgagccatggaacagcacttttacctctacttctaccgaattgaccacagtcactggcaccaatggtgtacgaactgacgaaaccatcattgtaatcagaacaccaacaacagccactactgccataactacaactgagccatggaacagcacttttacctctacttctaccgaattgaccacagtcaccggtaccaatggtttgccaactgatgagaccatcattgtcatcagaacaccaacaacagccactactgccatgactacaactcagccatggaacgacacttttacctctacttctaccgaattgaccacagtcaccggtaccaatggtttgccaactgatgagaccatcattgtcatcagaacaccaacaacagccactactgccatgactacaactcagccatggaacgacacttttacctctacttctaccgaattgaccacagtcaccggtaccaatggtttgccaactgatgagaccatcattgtcatcagaacaccaacaacagccactactgccatgactacaactcagccatggaacgacacttttacctctacatccactgaaatcaccaccgtcaccggtaccaatggtttgccaactgatgagaccatcattgtcatcagaacaccaacaacagccactactgccatgactacaactcagccatggaacgacacttttacctctacatccactgaaatgaccaccgtcaccggtaccaacggtttgccaactgatgaaaccatcattgtcatcagaacaccaacaacagccactactgccataactacaactgagccatggaacagcacttttacctctacatccactgaaatgaccaccgtcaccggtaccaacggtttgccaactgatgaaaccatcattgtcatcagaacaccaacaacagccactactgccataactacaactcagccatggaacgacacttttacctctacatccactgaaatgaccaccgtcaccggtaccaacggtttgccaactgatgaaaccatcattgtcatcagaacaccaacaacagccactactgccatgactacaactcagccatggaacgacacttttacctctacatccactgaaatcaccaccgtcaccggtaccaacggtttgccaactgatgagaccatcattgtcatcagaacaccaacaacagccactactgccatgactacaactcagccatggaacgacacttttacctctacatccactgaaatgaccaccgtcaccggtaccaacggcgttccaactgacgaaaccgtcattgtcatcagaactccaactagtgaaggtctaatcagcaccaccactgaaccatggactggtactttcacctctacatccactgagatgaccaccgtcaccggtactaacggtcaaccaactgacgaaaccgtgattgttatcagaactccaaccagtgaaggtttggttacaactacaaccgagccatggaccggtactttcacctctacatctactgagatgaccaccatcactggaaccaacggtcaaccaactgatgaaactgtcattattgtcaaaactccaactactgccatctcatccagtttgtcatcttcttcaggacaaatcaccagctttatcacgtctgcgcgtccaattattaccccattctatcctagcaatggaacttctgtgatttcctcctcagtaatttcttcctcagacacttcttctctagtcatttcttcctcagtcacttcttctctagtcacttcttctccagtcatttcttcttcattcatttcttcccctgtcatttcttctacaacaacctccgcttctatactctctgaatcatctaaatcatccgtcattccaaccagtagttccacctctggttcttctgagagcgaaacgggttcagctagttctgcctcttcttcctcttctatctcttctgaatcaccaaagtctacatattcgtcttcatcattaccacctgttaccagtgcaacaacaagtcaggaaattacttcttcattaccacctgttaccactacaaaaacgagcgaacaaaccactttggttaccgtgacatcctgcgaatctcatgtgtgcactgaatctatctcctctgcgattgtttccacggccaccgttactgttagcggtgccacaacagagtataccacatggtgccctatttctaccacagagataacaaagcaaactacggagacaacaaagcaaaccaaggggacaacagagcaaaccacagaaacaacaaaacaaaccacagtagttacaatttcttcttgtgaatctgacgtatgctctaagactgcttctccagccattgtatctacaagcactgctactattaatggcgttaccacagaatacacaacatggtgtcctatttccaccacagaatcgaagcaacaaactacgctagttactgttacttcctgcggatctggtgtgtgttccgaaactacttcacctgccattgtttcgacggccacggctactgtgaatgatgttgttacggtctattctacatggaggccacagactacgaatgaacagtctgtcagctctaaaatgaacagtgctaccagtgagacaacaaccaatactggagctgctgagacaactaccagtactggagctgctgagacgaaaacagtagtcacctcttcaatttcaagattcaatcatgctgaaacacagacggcttccgcgaccgatgtgattggtcacagcagtagtgttgtttctgtatccgaaactggcaacaccaagagtctaacaagttccgggttgagtactatgtcgcaacagcctcgtagcacaccagcaagtagcatggtaggatctagtacagcttctttagaaatttcaacgtatgctggcagtgccaacagcttactggccggtagtggtttaagtgtcttcattgcgtccttattgctggcaattatttaa

SEQ ID NO: 114 - protein, 1322 aa, Saccharomyces cerevisiae
MSLAHYCLLLAIVTLLGLTNVVSATTAACLPANSRKNGMNVNFYQYSLRDSSTYSNAAYMAYGYASKTKLGSVGGQTDISIDYNIPCVSSSGTFPCPQEDLYGNWGCKGIGACSNNPIIAYWSTDLFGFYTTPTNVTLEMTGYFLPPQTGSYTFKFATVDDSAILSVGGSIAFECCAQEQPPITSTNFTINGIKPWNGSPPDNITGTVYMYAGFYYPMKIVYSNAVAWGTLPISVTLPDGTTVSDDFEGYVYTFDNNLSQPNCTIPDPSNYTVSTTITTTEPWTGTFTSTSTEMTTVTGTNGVPTDETVIVIRTPTTASTIITTTEPWNSTFTSTSTELTTVTGTNGVRTDETIIVIRTPTTATTAITTTEPWNSTFTSTSTELTTVTGTNGLPTDETIIVIRTPTTATTAMTTTQPWNDTFTSTSTELTTVTGTNGLPTDETIIVIRTPTTATTAMTTTQPWNDTFTSTSTELTTVTGTNGLPTDETIIVIRTPTTATTAMTTTQPWNDTFTSTSTEITTVTGTNGLPTDETIIVIRTPTTATTAMTTTQPWNDTFTSTSTEMTTVTGTNGLPTDETIIVIRTPTTATTAITTTEPWNSTFTSTSTEMTTVTGTNGLPTDETIIVIRTPTTATTAITTTQPWNDTFTSTSTEMTTVTGTNGLPTDETIIVIRTPTTATTAMTTTQPWNDTFTSTSTEITTVTGTNGLPTDETIIVIRTPTTATTAMTTTQPWNDTFTSTSTEMTTVTGTNGVPTDETVIVIRTPTSEGLISTTTEPWTGTFTSTSTEMTTVTGTNGQPTDETVIVIRTPTSEGLVTTTTEPWTGTFTSTSTEMTTITGTNGQPTDETVIIVKTPTTAISSSLSSSSGQITSFITSARPIITPFYPSNGTSVISSSVISSSDTSSLVISSSVTSSLVTSSPVISSSFISSPVISSTTTSASILSESSKSSVIPTSSSTSGSSESETGSASSASSSSSISSESPKSTYSSSSLPPVTSATTSQEITSSLPPVTTTKTSEQTTLVTVTSCESHVCTESISSAIVSTATVTVSGATTEYTTWCPISTTEITKQTTETTKQTKGTTEQTTETTKQTTVVTISSCESDVCSKTASPAIVSTSTATINGVTTEYTTWCPISTTESKQQTTLVTVTSCGSGVCSETTSPAIVSTATATVNDVVTVYSTWRPQTTNEQSVSSKMNSATSETTTNTGAAETTTSTGAAETKTVVTSSISRFNHAETQTASATDVIGHSSSVVSVSETGNTKSLTSSGLSTMSQQPRSTPASSMVGSSTASLEISTYAGSANSLLAGSGLSVFIASLLLAII

SEQ ID NO: 115 - DNA, 1062 bp, Saccharomyces cerevisiae
atgccaaagagaattgtatacaatatatccagtgacttccagttgaagtcgttactgggagagggtgcatacggtgtggtatgttctgcaacgcataagcccacgggagaaatcgtggcaataaaaaagatcgaaccattcgataagcctttgttcgcattacgtacgctgcgtgaaataaagatcctgaagcacttcaagcacgaaaatatcataacaatcttcaacattcaacgccctgactcgttcgaaaacttcaatgaggtctacataattcaagagctaatgcagacagatttacaccgtgtaatctccacccagatgctgagtgacgatcatatacaatattttatataccaaaccttgagagcagtgaaagtgctgcatggttcgaacgtcatccatcgtgatttaaagccctccaaccttctcataaactccaactgtgacttgaaagtatgtgatttcggtttagcaagaatcattgacgagtcagccgcggacaattcagagcccacaggtcagcaaagcggcatgaccgagtatgtggccacacgttggtacagggcgccagaggtgatgttaacctctgccaaatactcaagggccatggacgtgtggtcctgcggatgtattctcgctgaacttttcttaagacggccaatcttccctggcagagattatcgccatcaactactactgatattcggtatcatcggtacacctcactcagataatgatttgcggtgtatagagtcacccagggctagagagtacataaagtcgcttcccatgtaccctgccgcgccactggagaagatgttccctcgagtcaacccgaaaggcatagatcttttacagcgtatgcttgtttttgaccctgcgaagaggattactgctaaggaggcactggagcatccgtatttgcaaacataccacgatccaaacgacgaacctgaaggcgaacccatcccacccagcttcttcgagtttgatcactacaaggaggcactaacgacgaaagacctcaagaaactcatttggaacgaaatatttagttag

SEQ ID NO: 116 - protein, 353 aa, Saccharomyces cerevisiae
MPKRIVYNISSDFQLKSLLGEGAYGVVCSATHKPTGEIVAIKKIEPFDKPLFALRTLREIKILKHFKHENIITIFNIQRPDSFENFNEVYIIQELMQTDLHRVISTQMLSDDHIQYFIYQTLRAVKVLHGSNVIHRDLKPSNLLINSNCDLKVCDFGLARIIDESAADNSEPTGQQSGMTEYVATRWYRAPEVMLTSAKYSRAMDVWSCGCILAELFLRRPIFPGRDYRHQLLLIFGIIGTPHSDNDLRCIESPRAREYIKSLPMYPAAPLEKMFPRVNPKGIDLLQRMLVFDPAKRITAKEALEHPYLQTYHDPNDEPEGEPIPPSFFEFDHYKEALTTKDLKKLIWNEIFS

SEQ ID NO: 117 - DNA, 4980 bp, Saccharomyces cerevisiae
atgtcattgagtcatctcactttagatcaatattatgaaatacagtgcaacgaacttgaagcgatacgttccatttatatggatgactttactgacttaactaaaagaaagtctagctgggataagcagccacagattatattcgaaattacgcttcgatctgttgacaaagagccggttgaatcttctataacattacattttgcgatgaccccaatgtatccttataccgctccagaaatagaattcaaaaatgtacaaaatgtaatggatagtcaattgcaaatgctgaaaagtgaatttaagaaaatccacaacacctcccgaggccaagagattatatttgaaattacatcttttactcaagaaaaactggacgaatttcaaaatgtggtaaatacacagtccttggaagatgatcgattacaaagaatcaaagaaactaaagaacaattagaaaaggaagaaagagaaaaacaacaggaaacaataaaaaaaagatcagatgagcagcgaaggatagatgaaattgttcaaagagagttggagaaaagacaagatgatgatgatgatttgctattcaacagaacaacccagttagatttacaaccaccttcagaatgggttgcatcaggtgaagctattgtcttttcaaaaactataaaggcaaaattgcctaataactcaatgttcaagtttaaagcagttgtaaatcctaagccaataaaactgacatcagatatatttagtttttccaaacaatttcttgtgaagccttatataccaccagaatctccgttggcagattttttaatgtcttctgaaatgatggaaaatttctactatttgctatctgaaattgaattggataatagctatttcaacacaagtaatggaaaaaaagaaatagcaaatttagagaaagagttagagacggtgttgaaagctaagcatgacaatgtgaatcgattgttcggttatacggtggagcgcatggggagaaataatgcaacgtttgtttggaaaataagactcttgacagagtactgtaactactatccattgggagatttgatacaatctgttggatttgttaacttagcaacagcgcgtatttggatgattagattgcttgaaggattggaggccatacacaaattgggaattgttcataaatgtatcaacttagaaaccgtgatcctggtgaaggatgcagattttggaagcactattcccaagttagttcactccacttatggctacactgttttgaatatgctatcgagatatccaaataaaaatggttcttcggttgagttatctccaagtacatggatagcccctgagttgttgaaattcaataacgccaaacctcaaagattaactgatatttggcaacttggtgttttgtttatccagataatcagtggatctgatatagtgatgaattttgaaacgcctcaagaattcctagattcaacaagtatggatgaaactttatatgatcttctttcgaaaatgcttaataacgatccgaagaaaagattaggaacattagaactactgcccatgaaattcttaaggaccaatattgactctacaatcaatcgatttaacttagtttccgaaagtgtcaattctaattccttggagttaactcctggagataccataaccgttcggggcaatggaggtagaacactttcacaatcgagtatacgaagaagatcatttaatgttggttccagattctcttctataaatcctgcaacgcgatcacgatatgcttctgactttgaagagattgcagttttaggccagggcgcatttggacaagttgtcaaggcacgtaatgctctcgatagcagatactatgcgatcaagaagattagacatacagaagaaaagttatctactatattgagtgaagtaatgctgttagcaagcttaaatcatcaatatgttgtgcgttactatgctgcatggttagaagaagacagtatggatgaaaacgtttttgaatcaactgatgaagaaagtgacttgagcgaatcttcctctgattttgaggaaaatgatttattagatcaaagcagtatttttaaaaatagaacaaatcacgatttggataatagtaactgggatttcatatcggggtcaggatatccggatattgtctttgaaaatagttctcgtgatgatgaaaatgaagatctagaccatgatacttcctcgacttcctcgagcgaaagtcaagatgatactgataaagaatcaaagagtatccagaacgttccaagaaggaggaattttgtaaaaccgatgactgctgttaagaagaaaagtacgctttttattcaaatggagtactgtgaaaatagaacgctatatgatttgatccattctgaaaatttaaatcaacaacgtgatgaatattggaggttatttcgacaaattttggaagcactgagttatatacattcccagggtatcattcatagggatctgaagccaatgaatatttttatagatgaatcgagaaatgttaaaatcggtgattttgggttagctaagaacgtccatagatctctggatatacttaagctagattcacagaatttgccaggcagctcagataatttaacatccgccattggtacagcaatgtatgttgctactgaagttttagatggtacaggtcactataatgaaaagattgatatgtattcacttggaatcattttttttgaaatgatctatcctttcagtacaggtatggagagagttaatattttgaaaaagttacgatcagtgtcgatagaatttcctcctgatttcgacgataataagatgaaagttgaaaagaaaattataaggttactcatagaccatgatcccaataaaaggcctggtgctaggacattattaaatagtggttggcttcctgtgaagcatcaggatgaagtaatcaaagaggctttaaaaagtttgtcgaatccttcatccccttggcaacagcaagttcgagaaagtttatttaaccaatcttacagtctaacaaatgatattctatttgataactcagttccaacatccactcctttcgcaaacattctcaggtcccaaatgacagaagaggtagttaaaattttcaggaaacatggaggaattgaaaataatgctcctccgaggatttttccaaaggcccccatatacggtacgcagaatgtatatgaagtgcttgacaagggcggtaccgtcttgcagttacaatatgatttaacttatcctatggctaggtatctatctaaaaatccaagtctgatttctaagcaatataggatgcagcacgtttaccgacctcctgatcattcaaggtcaagtttggaacctagaaagtttggtgagattgacttcgacataatttcaaaatcttcctcagagtcaggattttatgatgcagaaagcttgaaaattatcgatgaaatattaaccgtatttcctgtatttgagaaaacaaacacttttttcatattaaatcatgctgatattttggagagtgttttcaactttacaaatattgataaagcccaaaggcctctagtttcacgaatgttgtcgcaagtaggctttgcaaggtccttcaaggaagtaaagaatgaactaaaggcgcaactgaacatatcttctacggcattgaatgatttggagttatttgattttagactggacttcgaagcagccaaaaaacgcctgtataaattgatgattgatagtccgcatctaaaaaaaattgaggactctttgtcccatatatcaaaggttctcagttacctaaaacccttagaagttgcaagaaatgttgtgatatctcctttgagtaactacaatagcgctttttacaaaggaggtatcatgtttcatgcagtttatgacgatggatcctcacgtaatatgatagctgctggagggaggtatgacactttgatatccttttttgccagaccatcaggaaaaaagagcagcaatactcgtaaggctgtaggtttcaacttagcgtgggaaacaatattcggtatagcccaaaactatttcaaactcgcttctggaaataggataaagaagagaaataggtttttgaaagatacagctgttgattggaagccaagcaggtgtgatgtattgatatcgagtttttcgaactctttgttggacacaatcggggttacaatactgaatacattgtggaagcaaaacattaaagcggatatgttaagggattgttcctcggtggatgatgtcgttactggcgctcaacaggatggtatagactggattttgctgattaagcaacaagcgtatccactaaccaatcacaagagaaagtacaagccattaaaaataaaaaaattgagcactaatgttgacatagatttagatcttgatgagtttttaaccttgtaccaacaagaaactggtaataaatctttgatcaacgatagtctcactttgggcgataaggctgatgaatttaaaagatgggatgaaaacagcagtgccggtagtagtcaagaaggtgacatagatgatgttgttgctggttcgactaataatcaaaaggtaatttatgttccaaacatggctacaagatctaagaaagctaataaaagggaaaagtgggtttatgaggatgcagccagaaattcttcgaatatgatattacacaatttatccaatgcaccaattatcactgttgatgccttaagagatgaaactttagaaataatctcaattacttctttggctcagaaggaagaatggctgagaaaagtttttgggtcaggtaataactcgactcctagaagctttgccacgagcatttataataacctctccaaagaggctcataaagggaataggtgggcaatattatactgccacaaaaccggaaaatcatctgttatcgatttacagaggtag

SEQ ID NO: 118 - protein, 1659 aa, Saccharomyces cerevisiae [sequence omitted]

SEQ ID NO: 119 - DNA, 846 bp, Saccharomyces cerevisiae
atgtccgaatatcagccaagtttatttgctttaaatccaatgggtttctcaccattggatggttctaaatcaaccaacgaaaatgtatctgcttccacttctactgccaaaccaatggttggccaattgatttttgataaattcatcaagactgaagaggatccaattatcaaacaggataccccttcgaaccttgattttgattttgctcttccacaaacggcaactgcacctgatgccaagaccgttttgccaattccggagctagatgacgctgtagtggaatctttcttttcgtcaagcactgattcaactccaatgtttgagtatgaaaacctagaagacaactctaaagaatggacatccttgtttgacaatgacattccagttaccactgacgatgtttcattggctgataaggcaattgaatccactgaagaagtttctctggtaccatccaatctggaagtctcgacaacttcattcttacccactcctgttctagaagatgctaaactgactcaaacaagaaaggttaagaaaccaaattcagtcgttaagaagtcacatcatgttggaaaggatgacgaatcgagactggatcatctaggtgttgttgcttacaaccgcaaacagcgttcgattccactttctccaattgtgcccgaatccagtgatcctgctgctctaaaacgtgctagaaacactgaagccgccaggcgttctcgtgcgagaaagttgcaaagaatgaaacaacttgaagacaaggttgaagaattgctttcgaaaaattatcacttggaaaatgaggttgccagattaaagaaattagttggcgaacgctga

SEQ ID NO: 120 - protein, 281 aa, Saccharomyces cerevisiae [sequence omitted]

SEQ ID NO: 121 - DNA, 2358 bp, Saccharomyces cerevisiae
atggtatgtaccagcacgagctcaaacttttattccattgcacaatatattttacaatcatacttcaaggtcaatgtagattctctaaactctctgaaattggtggatttgatagtggaccaaacttaccctgattctttgacgctgcgaaagctgaatgaaggagcaacgggacaaccatacgattatttcaatacagtttctcgtgatgctgatatctccaagtgtccaatttttgcgttgaccatattttttgttatacgatggagccacccaaaccctccaatttcaattgagaattttactacagtaccgttgctagattcaaactttatttctctaaattccaatcctttactatatattcaaaatcaaaacccaaacagcaattcaagtgttaaagtttcaaggtcacaaacgtttgaaccttctaaagagttgatcgatttggtatttccatggctgtcttatttgaagcaggatatgcttcttattgataggacgaattacaagctttattctctctgtgaactatttgaatttatgggcagggttgccattcaggatctccgatatctgagtcaacatcccttattactacccaatatcgtaacattcatttcaaaatttattcctgagttattccaaaacgaagagtttaaaggaatcggttcaattaaaaattcaaacaataatgccctgaacaatgttacaggaatagaaacccaatttttaaatccatctaccgaggaagtgagtcaaaaagttgattcttactttatggaattatcaaaaaaattaactacagaaaatatcaggttaagtcaagaaataacacaactaaaagcagatatgaactccgtaggcaatgtttgtaaccaaattttgctgttgcagagacaattgctttcaggaaatcaggcgatcggatcaaagtccgaaaatattgtgtcttccacaggtggggggatattaatactagataaaaatagcatcaattcgaacgtactgagtaatttggttcagtcgatagatcctaatcactccaagcccaacggacaagcccaaacacatcaaaggggtccgaaaggacaatcacatgcacaggttcaaagtactaatagccctgcgctagcgccaattaacatgttcccgagcttaagtaattctatacagccgatgcttggcaccttggctccgcaaccgcaagatatagtacagaagaggaagctaccgttaccaggttcaatagcctctgcagcaacaggcagtcctttttctccatcacccgttggtgagtctccctatagcaaacgctttaaactagacgataaaccaactccgtctcagacggctcttgattccttacttacaaaatccatttcaagccctagattacccctttcgacgttggctaacacagctgtcacggaatcttttcgctcacctcagcagtttcagcattctccagattttgtagttggtggtagctcaagttcaacaacggaaaataactctaagaaggtaaatgaagattctccatcatcttcttcaaaactagctgaacgacctcgtcttccaaacaacgactccactactagcatgcctgaaagtcccaccgaggtagctggtgatgatgttgatagggagaaaccgccagagtcaagtaagtcggagcccaatgataacagcccagaatcgaaagatcctgagaaaaatggtaaaaacagtaatccgcttggtacggatgctgacaaaccagtaccaatttctaatattcataattctactgaggctgcaaattcaagtggtacagtgacaaagacagctccatcatttccgcagagttcttctaagtttgaaattataaataaaaaggatacgaaggcggggccaaacgaggcaatcaaatacaagctgtccagagaaaataaaacaatatgggacctatatgcggagtggtatattggtctgaacggtaaatcttcaataaaaaaattgattgaaaattatggctggcgaaggtggaaggttagcgaagattcacatttttttcctactagaagaattattatggattatattgaaacggaatgtgatcgtggcataaaactcggcaggtttactaatcctcaacaaccgagggaggatatacggaagattttagtaggggacctagaaaagttcaggataaataacggtctgactctgaattctctatcattgtactttagaaatttaacgaaaaataacaaggaaatttgtatttttgaaaactttaaaaattggaacgttagatcaatgacagaagaagagaaattaaagtattgcaaaaggcgacataatacaccatcttaa

SEQ ID NO: 122 - protein, 785 aa, Saccharomyces cerevisiae
MVCTSTSSNFYSIAQYILQSYFKVNVDSLNSLKLVDLIVDQTYPDSLTLRKLNEGATGQPYDYFNTVSRDADISKCPIFALTIFFVIRWSHPNPPISIENFTTVPLLDSNFISLNSNPLLYIQNQNPNSNSSVKVSRSQTFEPSKELIDLVFPWLSYLKQDMLLIDRTNYKLYSLCELFEFMGRVAIQDLRYLSQHPLLLPNIVTFISKFIPELFQNEEFKGIGSIKNSNNNALNNVTGIETQFLNPSTEEVSQKVDSYFMELSKKLTTENIRLSQEITQLKADMNSVGNVCNQILLLQRQLLSGNQAIGSKSENIVSSTGGGILILDKNSINSNVLSNLVQSIDPNHSKPNGQAQTHQRGPKGQSHAQVQSTNSPALAPINMFPSLSNSIQPMLGTLAPQPQDIVQKRKLPLPGSIASAATGSPFSPSPVGESPYSKRFKLDDKPTPSQTALDSLLTKSISSPRLPLSTLANTAVTESFRSPQQFQHSPDFVVGGSSSSTTENNSKKVNEDSPSSSSKLAERPRLPNNDSTTSMPESPTEVAGDDVDREKPPESSKSEPNDNSPESKDPEKNGKNSNPLGTDADKPVPISNIHNSTEAANSSGTVTKTAPSFPQSSSKFEIINKKDTKAGPNEAIKYKLSRENKTIWDLYAEWYIGLNGKSSIKKLIENYGWRRWKVSEDSHFFPTRRIIMDYIETECDRGIKLGRFTNPQQPREDIRKILVGDLEKFRINNGLTLNSLSLYFRNLTKNNKEICIFENFKNWNVRSMTEEEKLKYCKRRHNTPS

SEQ ID NO: 123 - DNA, 1605 bp, Saccharomyces cerevisiae
atgcatcaccaaactaagttagatgtattcataatcagagcttataatttactgtctaacgagtctgtcattagtggtgcttccttgcagagtgttacaaactcgccacagacgacaacgaacacgccctcaggtatggttaacggggcggttggaacagggatagctaatccaacagggttgatggggtctgatagcacacctaacatcgatgagattataactagcactggtagtaatgctctgacgaaaaccaactcagatagcgctaatggtacgccgaatggtaattcaagttctacctcagccattagcaatgcaagcaatcctgccactactggtaataatgcgagctctagtgccacctcaaatggaatatatacgcaagcgcaatattctcaacttttcgccaaaatatcaaaactatataacgctacactatcatctgggtcaattgacgatagatcaacatcaccaaaatcggcaatcgaactatatcaaagatttcaacagatgattaaggaactagagctgagttttgacgcaagtccttacgcaaaatacttccgccggttggatggaaggctttggcaaataaagacagactcagaattagaaaacgatgaattgtggcgattagtctcaatgagcatatttacagtattcgatcctcagaccggccaaattctaactcaaggacgcaggaagggaaactccttaaatacatcaactaaaggctccccatcagatttacagggaataaacaacgggaacaataatgggaacaatggtaatattggaaatgggagtaatattaagaactatggaaataaaaacatgccaaacaaccgaacgaaaaaaagaggcaccagggtggctaaaaatgctaaaaatgggaaaaacaataaaaatagtaataaagagagaaacggcattacagatacgagtgcattcagtaatacaacaataagcaacccaggtaccaatatgctttttgatccatcattgtctcaacagttacaaaaacgactgcaaacgctatcacaagatgtcaattctcgttcgttgacaggatattatacacagccaaccagtcctggctcaggaggatttgaatttggtttgagtcatgcagatctgaaccccaatgcttccagtaataccatgggctataatacaatgtccaataatggatcccattcgtggaaacgaaggtcactgggatcgttagatgttaatacgctggatgacgaagcggtggaagaacttttgcaactgacaaatacgagtaagaggcagaggccgatgacaactgcagcagagggtgcgttaataaatgatggtccggacactaatttaaacgcgaataacacccaaatgaaagttgatttaaatccttcaaacagcatgggacctatagatacagaagccgtgatacgcccattgaaagaagcttatgacgcaatcatttctgaaaaaggccaaagaattgtgcaattagaaagagaattggaattacagcgccaagagacgcagtggttaaggaaaatgttaattgaagacatgggttgtgttagaagtatgttaagggatttacaaagatga

SEQ ID NO: 124 - protein, 534 aa, Saccharomyces cerevisiae
MHHQTKLDVFIIRAYNLLSNESVISGASLQSVTNSPQTTTNTPSGMVNGAVGTGIANPTGLMGSDSTPNIDEIITSTGSNALTKTNSDSANGTPNGNSSSTSAISNASNPATTGNNASSSATSNGIYTQAQYSQLFAKISKLYNATLSSGSIDDRSTSPKSAIELYQRFQQMIKELELSFDASPYAKYFRRLDGRLWQIKTDSELENDELWRLVSMSIFTVFDPQTGQILTQGRRKGNSLNTSTKGSPSDLQGINNGNNNGNNGNIGNGSNIKNYGNKNMPNNRTKKRGTRVAKNAKNGKNNKNSNKERNGITDTSAFSNTTISNPGTNMLFDPSLSQQLQKRLQTLSQDVNSRSLTGYYTQPTSPGSGGFEFGLSHADLNPNASSNTMGYNTMSNNGSHSWKRRSLGSLDVNTLDDEAVEELLQLTNTSKRQRPMTTAAEGALINDGPDTNLNANNTQMKVDLNPSNSMGPIDTEAVIRPLKEAYDAIISEKGQRIVQLERELELQRQETQWLRKMLIEDMGCVRSMLRDLQR

SEQ ID NO: 125 - DNA, 2193 bp, Saccharomyces cerevisiae
atgcaagacgaccccgaaaattcgaagctgtacgacctgctgaatagtcatctggacgtgcatggtcgaagtaatgaagagccgagacaaactggtgacagtaggagccagagtagtggcaacaccggtgaaaacgaggaggatatagcatttgccagtggattaaacggcggcacattcgactcaatgctggaggcactgcccgatgatttatattttacggacttcgtgtctccttttacagcagctgccacgaccagcgtgactactaagacggtcaaggacaccacaccagctaccaatcatatggatgatgatattgcgatgtttgattcacttgccacaactcagcccatcgacatagccgcatccaaccaacaaaatggtgaaattgcacaactttgggactttaacgtggaccaattcaacatgacgcccagcaactcgagcggttcagctactattagtgctcctaacagctttacttccgacataccgcaatacaaccacggttccctcggcaacagcgtctccaaatcctcactgttcccgtataattccagcacgtccaacagcaacatcaaccagccatctatcaataacaactcaaatactaatgcgcagtcccaccattccttcaacatctacaaactacaaaacaacaactcatcttcatccgctatgaacattaccaataataataatagcaacaatagtaatatccagcatccttttctgaagaagagcgattcgataggattatcttcatccaacacaacaaattctgtaagaaaaaactcacttatcaagccaatgtcgtccacgtccctggccaatttcaaaagagctgcctcagtatcttccagtatatccaatatggaaccatcaggacaaaataaaaaacctctgatacaatgtttcaattgtaaaactttcaagacaccgctttggaggagaagcccagaggggaatactctttgcaatgcctgcggtcttttccagaaattacatggtaccatgaggccattatccttaaaatcggacgttatcaaaaagaggatttcaaagaagagagccaaacaaacggacccaaacattgcacaaaatactccaagtgcacctgcaactgcctcaacttcagtaaccactacaaatgctaaacccatacgatcgaggaaaaaatcactacaacaaaactctttatctagagtgatacctgaagaaatcattagagacaacatcggtaatactaataatatccttaatgtaaataggggaggctataacttcaactcagtcccctccccggtcctcatgaacagccaatcgtataatagtagtaacgcaaattttaatggagcaagcaatgcaaatttgaattctaataacttaatgcgtcacaattcgaacactgttactcctaattttagaaggtcttcaagacgaagtagtacttcatcgaacacctcaagttccagtaaatcttcatccagatctgttgttccgatattaccaaaaccttcacctaatagcgctaattcacagcagttcaacatgaacatgaacctaatgaacacaacaaataatgtaagtgcaggaaatagtgtcgcatcctcaccaagaattatatcgtccgcaaactttaactcaaatagtcctctacagcagaatctattatcaaattctttccaacgtcaaggaatgaatataccaagaagaaagatgtcgcgcaatgcatcgtactcctcatcgtttatggctgcgtctttgcaacaactgcacgaacagcaacaagtggacgtgaattccaacacaaacacgaattcgaatagacagaattggaattcaagcaatagcgtttcaacaaattcaagatcatcaaattttgtctctcaaaagccaaattttgatatttttaatactcctgtagattcaccgagtgtctcaagaccttcttcaagaaaatcacatacctcattgttatcacaacaattgcagaactcggagtcgaattcgtttatctcaaatcacaaatttaacaatagattatcaagtgactctacttcacctataaaatatgaagcagatgtgagtgcaggcggaaagatcagtgaggataattccacaaaaggatcttctaaagaaagttcagcaattgctgacgaattggattggttaaaatttggtatatga

SEQ ID NO: 126 - protein, 730 aa, Saccharomyces cerevisiae
MQDDPENSKLYDLLNSHLDVHGRSNEEPRQTGDSRSQSSGNTGENEEDIAFASGLNGGTFDSMLEALPDDLYFTDFVSPFTAAATTSVTTKTVKDTTPATNHMDDDIAMFDSLATTQPIDIAASNQQNGEIAQLWDFNVDQFNMTPSNSSGSATISAPNSFTSDIPQYNHGSLGNSVSKSSLFPYNSSTSNSNINQPSINNNSNTNAQSHHSFNIYKLQNNNSSSSAMNITNNNNSNNSNIQHPFLKKSDSIGLSSSNTTNSVRKNSLIKPMSSTSLANFKRAASVSSSISNMEPSGQNKKPLIQCFNCKTFKTPLWRRSPEGNTLCNACGLFQKLHGTMRPLSLKSDVIKKRISKKRAKQTDPNIAQNTPSAPATASTSVTTTNAKPIRSRKKSLQQNSLSRVIPEEIIRDNIGNTNNILNVNRGGYNFNSVPSPVLMNSQSYNSSNANFNGASNANLNSNNLMRHNSNTVTPNFRRSSRRSSTSSNTSSSSKSSSRSVVPILPKPSPNSANSQQFNMNMNLMNTTNNVSAGNSVASSPRIISSANFNSNSPLQQNLLSNSFQRQGMNIPRRKMSRNASYSSSFMAASLQQLHEQQQVDVNSNTNTNSNRQNWNSSNSVSTNSRSSNFVSQKPNFDIFNTPVDSPSVSRPSSRKSHTSLLSQQLQNSESNSFISNHKFNNRLSSDSTSPIKYEADVSAGGKISEDNSTKGSSKESSAIADELDWLKFGI

SEQ ID NO: 127 - DNA, 1419 bp, Saccharomyces cerevisiae
atggggtgtacagtgagtacgcaaacaataggagacgaaagtgatccttttctacagaacaaaagagccaatgatgtcatcgagcaatcgttgcagctggagaaacaacgtgacaagaatgaaataaaactgttactattaggtgccggtgagtcaggtaaatcaacggttttaaaacaattaaaattattacatcaaggcggtttctcccatcaagaaaggttacagtatgctcaagtgatatgggcagatgccatacaatcaatgaaaattttgattattcaggccagaaaactaggtattcaacttgactgtgatgatccgatcaacaataaagatttgtttgcatgcaagagaatactgctaaaggctaaagctttagattatatcaacgccagtgttgccggtggttctgattttctaaatgattatgtactgaagtactcagaaaggtatgaaactaggaggcgtgttcagagtaccggacgagcaaaagctgctttcgatgaagacggaaatatttctaatgtcaaaagtgacactgacagagatgctgaaacggtgacgcaaaatgaggatgctgatagaaacaacagtagtagaattaacctacaggatatttgcaaggacttgaaccaagaaggcgatgaccagatgtttgttagaaaaacatcaagggaaattcaaggacaaaatagacgaaatcttattcacgaagacattgctaaggcaataaagcaactttggaataacgacaaaggtataaagcagtgttttgcacgttctaatgagtttcaattggagggctcagctgcatactactttgataacattgagaaatttgctagtccgaattatgtctgtacggatgaagacattttgaagggccgtataaagactacaggcattacagaaaccgaatttaacatcggctcgtccaaattcaaggttctcgacgctggtgggcagcgttctgaacgtaagaagtggattcattgtttcgaaggaattacagcagttttatttgttttagcaatgagtgaatacgaccagatgttgtttgaggatgaaagagtgaacagaatgcatgaatcaataatgctatttgacacgttattgaactctaagtggttcaaagatacaccgtttattttgtttttaaataaaattgatttgttcgaggaaaaggtaaaaagcatgcccataagaaagtactttcctgattaccagggacgtgtcggcgatgcagaagcgggtctaaaatattttgagaagatatttttgagcttgaataagacaaacaaaccaatctacgtgaaacgaacctgcgctaccgatacccaaactatgaagttcgtattgagtgcagtcaccgatctaatcatccagcaaaaccttaaaaaaattggtattatatga

SEQ ID NO: 128 - protein, 472 aa, Saccharomyces cerevisiae
MGCTVSTQTIGDESDPFLQNKRANDVIEQSLQLEKQRDKNEIKLLLLGAGESGKSTVLKQLKLLHQGGFSHQERLQYAQVIWADAIQSMKILIIQARKLGIQLDCDDPINNKDLFACKRILLKAKALDYINASVAGGSDFLNDYVLKYSERYETRRRVQSTGRAKAAFDEDGNISNVKSDTDRDAETVTQNEDADRNNSSRINLQDICKDLNQEGDDQMFVRKTSREIQGQNRRNLIHEDIAKAIKQLWNNDKGIKQCFARSNEFQLEGSAAYYFDNIEKFASPNYVCTDEDILKGRIKTTGITETEFNIGSSKFKVLDAGGQRSERKKWIHCFEGITAVLFVLAMSEYDQMLFEDERVNRMHESIMLFDTLLNSKWFKDTPFILFLNKIDLFEEKVKSMPIRKYFPDYQGRVGDAEAGLKYFEKIFLSLNKTNKPIYVKRTCATDTQTMKFVLSAVTDLIIQQNLKKIGII

SEQ ID NO: 129 - DNA, 1350 bp, Saccharomyces cerevisiae
atgggtctctgcgcatcttcagaaaagaacggcagcactcctgacacgcagaccgccagcgctggtagtgacaacgttggcaaagcgaaggtaccaccaaagcaggagccacagaagactgtgagaacagtcaacacagcaaatcaacaagaaaagcaacaacagaggcagcagcagccgtctccgcataatgttaaggaccgcaaggagcaaaacgggagcattaataacgcgatatctcccacggctacggcaaatacaagcggatcgcaacagatcaatatcgactctgccctgagagacaggtcgagtaacgttgcagcacaaccatcattgtcggacgcttcaagtggcagcaacgacaaagaactgaaagtgctactgctgggtgccggtgaaagtggtaagtccacggtattgcagcagttgaagattttacaccagaacgggtttagcgagcaggaaattaaagagtacatccccttgatctatcagaatctattggaaattggcaggaacctcatccaggcgagaacaaggtttaacgtcaacttggaaccggagtgtgaactgacgcaacaagacctgtcgagaaccatgtcctatgaaatgcccaataactacacgggccaattcccggaagatatcgcgggcgtaatatctacgttgtgggccttgccctcaacacaagatttagtcaatgggcctaacgcatcgaagttctatctaatggactcgactccttacttcatggaaaatttcaccaggatcacttcgcccaattacagacccacccagcaggacatattaagatcgagacagatgacgtcagggatttttgacaccgtcattgatatggggtcggatatcaagatgcatatttacgacgtgggtggacagcgttccgaaagaaaaaaatggatacactgcttcgacaatgtcactctggtcatattttgcgtttctctatcggagtacgaccagacgctgatggaggacaagaaccagaacaggtttcaggaatcgctggtgcttttcgataatattgtcaacagtagatggttcgcgcgcacgtctgtcgtactctttctgaataaaatcgacctttttgctgaaaaactaagcaaagtgcctatggaaaattacttcccagactacaccggcgggtcagacatcaacaaggctgctaagtacatactctggaggtttgttcagttaaacagggcgaatctaagcatatatcctcacgtgacacaggccacagacacgtcgaatataagattagtatttgccgccatcaaagaaacaattttggaaaatacattgaaagactctggagtgttacaatga

SEQ ID NO: 130 - protein, 449 aa, Saccharomyces cerevisiae
MGLCASSEKNGSTPDTQTASAGSDNVGKAKVPPKQEPQKTVRTVNTANQQEKQQQRQQQPSPHNVKDRKEQNGSINNAISPTATANTSGSQQINIDSALRDRSSNVAAQPSLSDASSGSNDKELKVLLLGAGESGKSTVLQQLKILHQNGFSEQEIKEYIPLIYQNLLEIGRNLIQARTRFNVNLEPECELTQQDLSRTMSYEMPNNYTGQFPEDIAGVISTLWALPSTQDLVNGPNASKFYLMDSTPYFMENFTRITSPNYRPTQQDILRSRQMTSGIFDTVIDMGSDIKMHIYDVGGQRSERKKWIHCFDNVTLVIFCVSLSEYDQTLMEDKNQNRFQESLVLFDNIVNSRWFARTSVVLFLNKIDLFAEKLSKVPMENYFPDYTGGSDINKAAKYILWRFVQLNRANLSIYPHVTQATDTSNIRLVFAAIKETILENTLKDSGVLQ

SEQ ID NO: 131 - DNA, 2886 bp, Saccharomyces cerevisiae
atgataactgagggatttcccccgaatttaaacgcgttgaaagggtcatccttactagaaaagagagttgattctctccgacagcttaacactaccacggttaaccagctgctggggttgccggggatgacctctacattcacggctccgcaactgttgcagttaagaataatagctataactgcgtctgccgtgtcccttattgccggttgcctcggaatgttcttcctttctaaaatggataagagacgaaaagtcttcagacatgatctcatcgcatttttgataatttgcgactttcttaaagcttttattctgatgatttatcccatgattatccttattaataatagtgtgtatgcaacacctgcattttttaataccttgggttggtttacggcctttgccatcgaaggtgcagacatggccataatgatattcgccatacattttgctattttgatcttcaagcctaattggaaatggcgaaataaaagatcgggaaatatggagggtggcttgtacaaaaaaaggtcatatatctggccaattactgcattagtacctgccattttagcaagcttagccttcattaattataataaactcaatgacgattctgacaccactattatactggataataataactacaactttcccgattctcccaggcaaggtggctacaaaccttggagtgcatggtgctatttaccacccaagccgtactggtataaaattgttttaagctggggtcccagatatttcattattattttcatatttgcagtctacctcagtatttatattttcattaccagtgaaagtaaaagaattaaagcgcaaattggagactttaaccataacgtactagaggaagagaaagaaaagaaaaaattatttgggctcggtcactggggaaaagccaaatggtatttcagatcctattttaaattgccattgctacatcttttgagaaatttaaagaattttttcaccatttcgttcatagatccgaatgaggaaacagacgattcaggtagtagtaatggaactttcaattttggtgagagttcgaatgagatacctacactattcagaaaaacaaatacaggtagtgatgagaatgtctcggcaagtggtggagttcgcttacttgactataacagtgctaaaccactcgatatgtccaaatatgcaatgtctgaacagccagatttggaaagaaataatccttttgattgtgaaaatgacatcacactcaatccttcggaactagtatccaagcaaaaggagcataaagttacttttagtgttgaaaatgaaggactggatacaagaaaaagttcaatgctgggacatcagactttctcttgccaaaattctctagaatctcctttagcaatgtatgataataagaacgataacagcgacataactagtaacattaaggaaaaaggaggcatcatcaacaacaacagtaacaacgacgacgacgacaacaacaacaataacgataacgataacgataacaataatagcaataataataataacaataataataataacaataataataataacaataataataacaataacaacaacaacaacaataataataataatagtaataatattaaaaataacgttgataacaataatactaatccagccgataatattcctacactttctaatgaagcatttactccgtctcaacaattttcacaggagagagtgaataataatgcagacagatgcgaaaattcaagtttcaccaacgtacaacagcatttccaagcccaaacctacaaacaaatgaaaaaacgtagggcacaaattcaaaagaatctaagggcaatattcatttatccactgtcgtatattgggatatggcttttccccatcattgcagatgcgttgcaatacaatcatgaaataaagcatgggcctaccatgtgggtgacatacattgacacttgcgttcgaccattaagttgtctcgtcgacgtcattgtttacctgttcaaggaaaaaccttggaactattcatgggcaaaaacagaatcaaaatatctcattgaaaaatatattctgaaaggagagcttggtgaaaaggaaattctgaagttttgtcacagcaattgggggaaaagaggttggtattatcgtggtaagtggaagaaaagaaaatgctggaaatattctacaaaccctctgaagcgtatactgtggtttgttgaacgcttctttaaacaattgtttgaactaaaactacactttagtttttatgacaattgtgacgattttgaatactgggaaaactactattcagccaaagattcaaacgataataaacgcacagaatctgatgagactaaaacgaatagtagcgatcgctcccttccatcaaattcacttgaactacaggcaatgcttaataacatcacggccgaagaggttgaagtgcccttgttttggaggatcattcatcatattccaatgcttggcggaatagatcttgatgagttaaacagattgttgaaaatacggtacaataacgaccatttttctctacccgggttgaaatttgcattaaaccaaaataaaagtcacgataaacatcaggacgtctcaactaacagtatggtcaaatccagcttcttttcaagcaatattgtcacaaacgatgatgagaatagcattgaagaggataagaatttacgctattcagatgctagtgcatctgaaaattatctggtcaagcccacaataccaggtacgactcctgatccaataattgaggcgcagaacgataatgatagtagtgatagtagcggcatagatttgatagccttcttaagaaatggaccattataa

SEQ ID NO: 132 - protein, 961 aa, Saccharomyces cerevisiae
MITEGFPPNLNALKGSSLLEKRVDSLRQLNTTTVNQLLGLPGMTSTFTAPQLLQLRIIAITASAVSLIAGCLGMFFLSKMDKRRKVFRHDLIAFLIICDFLKAFILMIYPMIILINNSVYATPAFFNTLGWFTAFAIEGADMAIMIFAIHFAILIFKPNWKWRNKRSGNMEGGLYKKRSYIWPITALVPAILASLAFINYNKLNDDSDTTIILDNNNYNFPDSPRQGGYKPWSAWCYLPPKPYWYKIVLSWGPRYFIIIFIFAVYLSIYIFITSESKRIKAQIGDFNHNVLEEEKEKKKLFGLGHWGKAKWYFRSYFKLPLLHLLRNLKNFFTISFIDPNEETDDSGSSNGTFNFGESSNEIPTLFRKTNTGSDENVSASGGVRLLDYNSAKPLDMSKYAMSEQPDLERNNPFDCENDITLNPSELVSKQKEHKVTFSVENEGLDTRKSSMLGHQTFSCQNSLESPLAMYDNKNDNSDITSNIKEKGGIINNNSNNDDDDNNNNNDNDNDNNNSNNNNNNNNNNNNNNNNNNNNNNNNNNNNNNSNNIKNNVDNNNTNPADNIPTLSNEAFTPSQQFSQERVNNNADRCENSSFTNVQQHFQAQTYKQMKKRRAQIQKNLRAIFIYPLSYIGIWLFPIIADALQYNHEIKHGPTMWVTYIDTCVRPLSCLVDVIVYLFKEKPWNYSWAKTESKYLIEKYILKGELGEKEILKFCHSNWGKRGWYYRGKWKKRKCWKYSTNPLKRILWFVERFFKQLFELKLHFSFYDNCDDFEYWENYYSAKDSNDNKRTESDETKTNSSDRSLPSNSLELQAMLNNITAEEVEVPLFWRIIHHIPMLGGIDLDELNRLLKIRYNNDHFSLPGLKFALNQNKSHDKHQDVSTNSMVKSSFFSSNIVTNDDENSIEEDKNLRYSDASASENYLVKPTIPGTTPDPIIEAQNDNDSSDSSGIDLIAFLRNGPL

SEQ ID NO: 133 - DNA, 3456 bp, Saccharomyces cerevisiae
atggatcaggataacaacaaccacaatgacagcaataggctgcacccacctgatatacatccaaatttgggccctcaattgtggctgaatagtagcggtgattttgacgacaacaacaacaacaacaacaacaacaacaataataatagcacaagaccacaaatgccatcacgaactagagaaacggcaacttcggaaagaaatgcaagtgaggttagggatgcaacgctaaataatatctttaggttcgatagtattcaacgggaaacgcttttgccaaccaacaacggacaaccgctaaatcaaaacttttcgctgacatttcaaccacaacagcaaacaaatgcgctgaacgggattgacataaacactgtgaacacaaaccttatgaatggtgtcaatgttcaaatagatcaacttaatcgattgttaccgaacctaccagaggaagaacggaagcaaatccacgaattcaagctaatagtgggcaaaaaaatccaagagtttctggttgttatagagaaacgtagaaaaaaaatactgaacgaaattgagctagacaaccttaaactaaaggagctacgtattgataactccccacaagcaattagttatttgcataaattacaaagaatgaggcttagggcgctagagacagaaaacatggaaattagaaatttaaggctaaaaatattaacaattatagaagagtacaaaaagtcattatatgcatactgccattccaagctaagaggtcaacaagtggaaaatccaacagataatttcatcatttggataaactccatagatactactgaatcatctgacttgaaagaagggctacaagatctttcgagatattcaaggcagttcataaataatgtgctttcgaatccatcaaatcaaaacatatgtacgagtgtcacccgaagatcacctgtgtttgccctaaacatgctaccctcggaaatattacacttaatattagataaacttaaccaaaaatatgatattgtaaaattccttaccgtttccaaactctgggctgaaataattgtgaagatactttattacagaccgcacatcaacaaaaagagtcaattagacttgtttttaaggactatgaagttaacttctgaagaaactgtattcaactatcgtttaatgatcaaaagattaaatttttcatttgttggtgactacatgcacgatacagagcttaactattttgtcggatgtaagaatttggagcgactaactttagtattttgcaagcatataaccagtgttccaatatcggctgttttgagaggatgtaaatttctccaaagtgtggatatcactggaataagagacgtttccgatgacgtatttgataccttagcgacatattgtcccagagtacagggcttttatgttcctcaggcaaggaatgtaacattcgattcactgcggaatttcatagtccattccccgatgttgaaaagaataaaaatcacagcaaacaataacatgaatgacgaattagtagaactattagccaacaaatgccctttgcttgtagaggtcgatataacattaagtccaaatgtcactgattctagtttgttaaaactcctcactaggttagttcagctgagggaattcagaataactcataatacgaatattacggataatcttttccaggagctttctaaagtagttgacgatatgccctctttaagattgattgatctttctggatgtgaaaatattacagataaaactatagaaagtatagtcaatttagcccctaaattacgtaatgtttttctaggcaagtgtagccgaattacagatgcatcgttgttccaattatcgaagctgggcaaaaacttgcaaacagtgcattttgggcactgtttcaatataactgataacggggtaagagcactctttcattcatgtacaagaatacagtatgtggactttgcgtgctgtacgaatttaaccaatagaactctttatgaactagcagacttaccaaaattaaagagaattggccttgtcaaatgtacgcaaatgactgacgagggtttgttgaatatggtttccttgcgaggccgaaatgatactttagaaagggtacatttatcttactgttctaatttaacaatatatccgatatatgagcttctaatgtcttgcccaaggctctcacatttgtctttgactgctgttccgtcatttttacgccccgatataacgatgtattgcaggcctgcaccctcagactttagtgaaaatcaacgtcaaatattctgcgtattttcagggaaaggtgttcataaacttcgccattatttagtaaatttaacgtcgcccgcttttggaccacatgtcgatgtaaatgatgttttgacaaaatatattagatccaagaatttgatatttaacggtgaaacacttgaagatgctcttaggagaatcataactgatttaaatcaagattccgctgcaattatagctgctacaggattaaatcaaatcaacggtctaaataacgattttcttttccagaatatcaattttgaacgaatagatgaagtattcagttggtatctcaatacttttgatggcattaggatgagctcggaggaagttaactcactattattgcaagtaaacaagacgttttgtgaagatccatttagtgatgtggacgatgatcaagattatgtcgtagcacctggtgtaaaccgggaaattaacagtgaaatgtgtcatattgttagaaaattccatgagttaaatgatcatattgatgatttcgaggtgaatgttgctagtttggtaagagttcagtttcagtttactggttttttacttcatgaaatgactcaaacctatatgcaaatgattgaattaaacagacaaatttgtttagtacaaaaaacggttcaggaatcgggcaacatagattaccaaaaagggcttttaatatggcgacttttattcattgacaaattcattatggtggttcagaagtacaagctctccaccgttgttttgagactatatttaaaagataacataacattgttaaccagacaaagagaactattaatagcccaccaaagatcagcatggaataacaataatgacaatgacgccaaccggaacgccaacaacatagtgaatattgtatcggatgctggggcaaacgatacaagtaacaatgaaactaacaatggtaatgatgacaatgaaacagaaaatccaaatttctggcgtcagtttggcaatagaatgcaaatatcacctgaccagatgaggaatctccaaatgggacttcgtaatcagaacatggttaggaacaataacaacaacacaattgacgaatcaatgcctgacactgccattgattctcaaatggatgaagcatcaggaacgcccgatgaagatatgttataa

SEQ ID NO: 134 - protein, 1151 aa, Saccharomyces cerevisiae
MDQDNNNHNDSNRLHPPDIHPNLGPQLWLNSSGDFDDNNNNNNNNNNNNSTRPQMPSRTRETATSERNASEVRDATLNNIFRFDSIQRETLLPTNNGQPLNQNFSLTFQPQQQTNALNGIDINTVNTNLMNGVNVQIDQLNRLLPNLPEEERKQIHEFKLIVGKKIQEFLVVIEKRRKKILNEIELDNLKLKELRIDNSPQAISYLHKLQRMRLRALETENMEIRNLRLKILTIIEEYKKSLYAYCHSKLRGQQVENPTDNFIIWINSIDTTESSDLKEGLQDLSRYSRQFINNVLSNPSNQNICTSVTRRSPVFALNMLPSEILHLILDKLNQKYDIVKFLTVSKLWAEIIVKILYYRPHINKKSQLDLFLRTMKLTSEETVFNYRLMIKRLNFSFVGDYMHDTELNYFVGCKNLERLTLVFCKHITSVPISAVLRGCKFLQSVDITGIRDVSDDVFDTLATYCPRVQGFYVPQARNVTFDSLRNFIVHSPMLKRIKITANNNMNDELVELLANKCPLLVEVDITLSPNVTDSSLLKLLTRLVQLREFRITHNTNITDNLFQELSKVVDDMPSLRLIDLSGCENITDKTIESIVNLAPKLRNVFLGKCSRITDASLFQLSKLGKNLQTVHFGHCFNITDNGVRALFHSCTRIQYVDFACCTNLTNRTLYELADLPKLKRIGLVKCTQMTDEGLLNMVSLRGRNDTLERVHLSYCSNLTIYPIYELLMSCPRLSHLSLTAVPSFLRPDITMYCRPAPSDFSENQRQIFCVFSGKGVHKLRHYLVNLTSPAFGPHVDVNDVLTKYIRSKNLIFNGETLEDALRRIITDLNQDSAAIIAATGLNQINGLNNDFLFQNINFERIDEVFSWYLNTFDGIRMSSEEVNSLLLQVNKTFCEDPFSDVDDDQDYVVAPGVNREINSEMCHIVRKFHELNDHIDDFEVNVASLVRVQFQFTGFLLHEMTQTYMQMIELNRQICLVQKTVQESGNIDYQKGLLIWRLLFIDKFIMVVQKYKLSTVVLRLYLKDNITLLTRQRELLIAHQRSAWNNNNDNDANRNANNIVNIVSDAGANDTSNNETNNGNDDNETENPNFWRQFGNRMQISPDQMRNLQMGLRNQNMVRNNNNNTIDESMPDTAIDSQMDEASGTPDEDML

SEQ ID NO: 135 - DNA, 5688 bp, Saccharomyces cerevisiae
atgtcctacaacgatccaaacttgaatggacagtattacagtaacggtgatgggactggtgacggtaattaccctacgtaccaagtgacacaggatcaaagtgcgtacgatgagtacggtcagccaatctatacacaaaaccaactggatgatggttattatgatccaaacgaacaatacgttgacggtacacaatttcctcagggacaagatccttcacaagaccaaggtccttataataacgatgctagttactataaccaaccccccaatatgatgaacccgtcttctcaagatggagagaacttctcagattttagcagctatggtcccccatccggcacttatcctaacgatcaatatactccttctcaaatgagttatcctgatcaagatggttcttcaggggcctcaaccccctatggaaatggtgtcgttaatggtaatggccagtactacgaccctaatgctattgaaatggctttaccaaatgatccatatcccgcatggaccgcagatccccagtctcccctgcccatcgaacaaatcgaagatatcttcatagatttaacaaataaattcggttttcagagagattccatgagaaatatgtttgaccattttatgacccttttggactctagatcttctaggatgtctccagaacaggcccttttatcattacatgcagactacataggtggagatacggccaactacaaaaaatggtactttgccgctcaacttgatatggatgatgaaattggtttcaggaatatgaagttgggtaagctatcaagaaaggcaagaaaggctaagaagaaaaataaaaaagccatgcaagaggctagtcctgaagacactgaggagactttaaatcaaattgagggtgataactcattagaagctgcggattttagatggaagtcaaagatgaatcaactttctccatttgaaatggttcgtcaaattgccttgtttttattatgttggggcgaggcaaatcaagtcagatttaccccggagtgtctttgtttcatttataaatgcgcctctgattacttagattctgcacaatgtcaacaacgtcctgatcccttgcctgaaggtgattttttgaatagagttattactcctctttatcgttttattaggagccaggtttacgaaatcgtggatggtcgatacgtgaagagtgaaaaagatcataacaaagttattgggtatgatgatgtcaatcaattattctggtatccagaaggtatagcaaaaattgtcatggaagatggaaccaggttgattgatttgccagcagaggagcgttatttgaaattgggagaaattccctgggatgatgtcttctttaaaacttacaaagaaacacgttcctggttacatttagttaccaacttcaatcgtatttggatcatgcacatctcagtatattggatgtattgtgcttacaatgctccaactttttatactcacaactatcaacaattggtcgacaatcagcctttggcagcttataaatgggccactgcagcattaggtggtactgtggcaagtttgattcaagttgccgctactttgtgcgagtggtcattcgttcctagaaaatgggcgggtgctcaacatttgtcccgtagattctggttcttgtgtgtcattatgggtattaatttggggcctgtgatatttgttttcgcttatgataaggacacagtatattctactgccgctcatgtcgttggagcagttatgttttttgttgctgtggcaacacttgttttcttttccgtaatgccattgggtggattatttacatcgtatatgaaaaagtccacaagaagttatgttgcctcacagaccttcaccgcatcttttgctccattgcatggtttagacaggtggatgtcttatttggtttgggtaaccgtttttgctgctaaatatgcagagtcatatttttttctaatactgtcactaagagatccaattaggattttatctactacatcaatgagatgtactggtgaatactggtggggtaataagatttgtaaggtccagccaaagattgttttaggtttaatgattgcgactgacttcattttgttctttttggatacctacttgtggtatatcgttgttaacactgttttctcggtcggaaaatcgttctatttgggtatttctatcttaactccatggagaaatattttcactagattgccaaaaagaatttattctaagatcttggctactactgatatggaaataaaatataaaccgaaagtactaatttctcagatttggaatgctatcattatctccatgtacagagaacatttattagccatagaccatgtacaaaaattgttatatcatcaggttccgtccgaaattgaaggtaagaggactttgagagcaccaactttctttgtttcccaagatgacaataattttgagactgaatttttccctagagattcagaagctgagcgccgtatttcattttttgcccaatctctatccactccaattccagaaccactaccagttgacaacatgccaacatttactgtattaactccccattacgccgagaggattctattatcattgagagaaattattcgtgaagatgatcaattttcaagagttactcttttggaatacctgaagcaattacacccggtagaatgggactgttttgttaaggatacgaaaattcttgctgaagaaacggccgcatatgaaaacaatgaagatgaacctgaaaaggaagacgctctgaaatctcaaattgatgatttacctttctattgtattggtttcaaatctgctgcaccagaatacaccttacgtacgagaatctgggcctctttaaggtcgcaaactttgtatcgcacaatctcggggtttatgaattattcgagggccataaaattactttatcgtgtggaaaatccagaaatcgttcaaatgttcggtggtaatgctgatggattagaaagagaactggaaaaaatggcaaggcgaaaattcaaattcttggtttcgatgcaaagattggccaagtttaaaccacatgaactagaaaatgctgagttcctgttgagagcttatccggacttgcaaattgcctacctggatgaagaacctcccttaaacgaaggcgaagagccaagaatttactcggccttaattgatggtcattgtgagattttagagaatggtcgtagacgtcccaaatttagagttcaactatccggtaatccaattcttggtgatggtaaatcagataatcaaaatcatgctttgattttttacagaggtgagtatattcaattgattgatgctaatcaagacaattacttggaagagtgtttgaaaatcaggtctgtcttagcagaatttgaagaattgggaattgagcaaattcatccttatactcctggtttaaaatatgaggaccaatccacaaatcatcctgttgcaattgtcggcgctagagaatatattttctcagaaaactctggtgttcttggtgatgtagcggctggtaaagaacaaacttttggtacattatttgcccgtactttggcacagattggtggtaaattgcattatggtcatccagattttattaatgcgacattcatgactactaggggtggtgtttccaaagcacaaaagggtctacatttaaatgaagatatttatgccggtatgaatgccgtacttcggggtggtcgtatcaagcattgcgaatattatcagtgtggtaaaggtagagatttaggttttggtacaattttgaatttcactactaagatcggtgctggtatgggtgaacaaatgttatctcgtgaatactattatttgggtacgcaattacctattgaccgttttttaacattttattatgcgcatccagggtttcacttgaataacttatttattcaattgtctctgcagatgttcatgttaactttagtgaacttgcatgctttggctcatgaatccattctgtgtgtttacgatagggataagccaattactgatgttttgtatccaattggttgttacaactttcatcctgcgattgattgggtgagacgttatacactctctattttcatcgtcttttggattgcttttgtccctattgtcgttcaggaattaatcgagcgtggtctgtggaaggcgacacaaagatttttccgtcacattttatctctatctccaatgtttgaagtctttgctggccaaatctattcttcagcactgttaagtgatatcgctgtgggtggtgctcgttatatttcaacaggtcgtggctttgctacatctcgtatacctttctctattctttattcaagatttgcgggttcagccatttatatgggatcaagatcaatgttgatgttattatttggtaccgtggcacattggcaagctccactattatggttttgggcatcattatcagccttaatctttgcaccattcattttcaatccacatcaatttgcttgggaagattttttcctagactacagagattatatcagatggctgtcaagaggtaataataagtaccacaggaactcatggattggttatgtaagaatgtcgaggtctcgtgttactggtttcaagcgcaaactggtgggtgatgagtctgaaaaatctgcaggcgatgcaagcagggctcatagaaccaatttaattatggctgaaattataccgtgtgcgatttacgcagcaggttgttttattgccttcacgtttattaatgcacaaactggtgtcaagactactgatgaagatagagtaaattccaccttacgtatcatcatttgcaccttggcgcctattgttatcgatattggtgttttattcttctgtatgggtttgtcatgctgctctggccctttgttgggcatgtgctgcaagaaaactggttctgttatggcagggatcgctcacggtatcgctgttgttgtccatattgtctttttcattgtcatgtgggttttagagggttttagttttgttaggatgttgattggcgttgttacatgtatacaatgtcaaaggttgatttttcactgtatgactgtactgttgctgacccgtgagttcaagaatgatcacgctaatactgccttttggacaggcaaatggtacagcaccggtttaggatatatggcatggactcaaccgacaagggaattgactgcaaaagtcattgagctttccgagtttgcagcggattttgttttggggcatgtaattttgatcttccaactaccagtcatttgtattccaaagatagataagtttcactccatcatgttattttggttaaaaccatcccgtcaaatccgtcctcctatttactctttgaaacaagcacgcctacgtaaacgtatggttaggaggtattgcagcttgtactttttggtactgatcatattcgcgggatgcatcgttggccctgccgttgcttcagcacatgttccaaaagaccttggatctgggttgacgggtactttccataacttggttcaaccaaggaacgtatctaacaatgatacagggtcccagatgtctacttataagagtcattattacactcatacgccatccttaaagacctggtctacgatcaaatga

SEQ ID NO: 136 - protein, 1895 aa, Saccharomyces cerevisiae
MSYNDPNLNGQYYSNGDGTGDGNYPTYQVTQDQSAYDEYGQPIYTQNQLDDGYYDPNEQYVDGTQFPQGQDPSQDQGPYNNDASYYNQPPNMMNPSSQDGENFSDFSSYGPPSGTYPNDQYTPSQMSYPDQDGSSGASTPYGNGVVNGNGQYYDPNAIEMALPNDPYPAWTADPQSPLPIEQIEDIFIDLTNKFGFQRDSMRNMFDHFMTLLDSRSSRMSPEQALLSLHADYIGGDTANYKKWYFAAQLDMDDEIGFRNMKLGKLSRKARKAKKKNKKAMQEASPEDTEETLNQIEGDNSLEAADFRWKSKMNQLSPFEMVRQIALFLLCWGEANQVRFTPECLCFIYKCASDYLDSAQCQQRPDPLPEGDFLNRVITPLYRFIRSQVYEIVDGRYVKSEKDHNKVIGYDDVNQLFWYPEGIAKIVMEDGTRLIDLPAEERYLKLGEIPWDDVFFKTYKETRSWLHLVTNFNRIWIMHISVYWMYCAYNAPTFYTHNYQQLVDNQPLAAYKWATAALGGTVASLIQVAATLCEWSFVPRKWAGAQHLSRRFWFLCVIMGINLGPVIFVFAYDKDTVYSTAAHVVGAVMFFVAVATLVFFSVMPLGGLFTSYMKKSTRSYVASQTFTASFAPLHGLDRWMSYLVWVTVFAAKYAESYFFLILSLRDPIRILSTTSMRCTGEYWWGNKICKVQPKIVLGLMIATDFILFFLDTYLWYIVVNTVFSVGKSFYLGISILTPWRNIFTRLPKRIYSKILATTDMEIKYKPKVLISQIWNAIIISMYREHLLAIDHVQKLLYHQVPSEIEGKRTLRAPTFFVSQDDNNFETEFFPRDSEAERRISFFAQSLSTPIPEPLPVDNMPTFTVLTPHYAERILLSLREIIREDDQFSRVTLLEYLKQLHPVEWDCFVKDTKILAEETAAYENNEDEPEKEDALKSQIDDLPFYCIGFKSAAPEYTLRTRIWASLRSQTLYRTISGFMNYSRAIKLLYRVENPEIVQMFGGNADGLERELEKMARRKFKFLVSMQRLAKFKPHELENAEFLLRAYPDLQIAYLDEEPPLNEGEEPRIYSALIDGHCEILENGRRRPKFRVQLSGNPILGDGKSDNQNHALIFYRGEYIQLIDANQDNYLEECLKIRSVLAEFEELGIEQIHPYTPGLKYEDQSTNHPVAIVGAREYIFSENSGVLGDVAAGKEQTFGTLFARTLAQIGGKLHYGHPDFINATFMTTRGGVSKAQKGLHLNEDIYAGMNAVLRGGRIKHCEYYQCGKGRDLGFGTILNFTTKIGAGMGEQMLSREYYYLGTQLPIDRFLTFYYAHPGFHLNNLFIQLSLQMFMLTLVNLHALAHESILCVYDRDKPITDVLYPIGCYNFHPAIDWVRRYTLSIFIVFWIAFVPIVVQELIERGLWKATQRFFRHILSLSPMFEVFAGQIYSSALLSDIAVGGARYISTGRGFATSRIPFSILYSRFAGSAIYMGSRSMLMLLFGTVAHWQAPLLWFWASLSALIFAPFIFNPHQFAWEDFFLDYRDYIRWLSRGNNKYHRNSWIGYVRMSRSRVTGFKRKLVGDESEKSAGDASRAHRTNLIMAEIIPCAIYAAGCFIAFTFINAQTGVKTTDEDRVNSTLRIIICTLAPIVIDIGVLFFCMGLSCCSGPLLGMCCKKTGSVMAGIAHGIAVVVHIVFFIVMWVLEGFSFVRMLIGVVTCIQCQRLIFHCMTVLLLTREFKNDHANTAFWTGKWYSTGLGYMAWTQPTRELTAKVIELSEFAADFVLGHVILIFQLPVICIPKIDKFHSIMLFWLKPSRQIRPPIYSLKQARLRKRMVRRYCSLYFLVLIIFAGCIVGPAVASAHVPKDLGSGLTGTFHNLVQPRNVSNNDTGSQMSTYKSHYYTHTPSLKTWSTIK

SEQ ID NO: 137 - DNA, 1191 bp, Saccharomyces cerevisiae
atgaggtttaggagttcttcccatagcttaaaacatgttgacagagaattaaaggagttgattaattcgtccgagaatgccaataaatgcggtgaatgtggtaatttctacccaacttggtgctcagttaatttgggggttttcctttgtggtaggtgtgcctctgttcatagaaaagttttcggtagcagagacgacgatgccttttctaacgttaaatcactatcaatggatagatggacaagagaggatatcgatgaattagtgagtcttggaggcaataaggggaatgctcggttctggaatcctaaaaatgtcccttttccttttgatggagatgatgacaaagccatcgtggagcattacattagagacaagtatattttgggtaaattcaggtatgatgaaataaagcctgaagactttggatccagaatggatgattttgatggggaatcggacaggtttgatgaaagaaatagaagtaggagcaggagcagatctcattctttctataaagggggccataataggtctgactacggcggttccagggactcattccaaagcagtggaagcagatattctaggcaactggcagaactcaaggacatgggtttcggtgatacaaacaaaaatttagatgcattatcgtccgctcacggaaatatcaatagagcaatcgattatctagaaaaaagttcaagttcaagaaatagtgtatcggcagcagcgacaacatcaactccgcccctgcccaggagacgtgcgacaacaagtggcccacagccagctatttttgatggtacaaatgtaatcacgccagattttacttcaaattcagcatcttttgtacaagcaaagccagcagttttcgatggtacccttcaacagtattacgatcctgctaccggaatgatatatgtagatcagcagcaatacgccatggctatgcaacagcagcaacagcaacagcaacagcttgctgtcgcacaggctcaggctcaggcacaggcacaggcacaggctcaagttcaggctcaggctcaggctcaggcccaggctcaggctcaagcacagcagatccagatgcaacagcttcagatgcagcaacagcaacaggcgccattatcttttcagcaaatgtcgcaaggaggaaacctgccacaaggttatttctacacacaataa

SEQ ID NO: 138 - protein, 396 aa, Saccharomyces cerevisiae
MRFRSSSHSLKHVDRELKELINSSENANKCGECGNFYPTWCSVNLGVFLCGRCASVHRKVFGSRDDDAFSNVKSLSMDRWTREDIDELVSLGGNKGNARFWNPKNVPFPFDGDDDKAIVEHYIRDKYILGKFRYDEIKPEDFGSRMDDFDGESDRFDERNRSRSRSRSHSFYKGGHNRSDYGGSRDSFQSSGSRYSRQLAELKDMGFGDTNKNLDALSSAHGNINRAIDYLEKSSSSRNSVSAAATTSTPPLPRRRATTSGPQPAIFDGTNVITPDFTSNSASFVQAKPAVFDGTLQQYYDPATGMIYVDQQQYAMAMQQQQQQQQQLAVAQAQAQAQAQAQAQVQAQAQAQAQAQAQAQQIQMQQLQMQQQQQAPLSFQQMSQGGNLPQGYFYTQ

SEQ ID NO: 139 - DNA, 4509 bp, Saccharomyces cerevisiae
atgtcgaataccccttataattcatctgtgccttccattgcatccatgacccagtcttcggtctcaagaagtcctaacatgcatacagcaactacgcccggtgccaacaccagctctaactctccacccttgcacatgtcttcagattcgtccaagatcaagaggaagcgtaacagaattccgctcagttgcaccatttgtcggaaaaggaaagtcaaatgtgacaaactcagaccacactgccagcagtgcactaaaactggggtagcccatctctgccactacatggaacagacctgggcagaagaggcagagaaagaattgctgaaggacaacgaattaaagaagcttagggagcgcgtaaaatctttagaaaagactctttctaaggtgcactcttctccttcgtctaactccttgaaaagttacaacactcccgagagcagcaacctgtttatgggtagcgatgaacacaccacccttgttaatgcaaatacaggctctgcttcctctgcctcgcatatgcatcagcaacaacagcaacagcagcaacaggaacaacaacaagacttttccagaagtgcgaacgccaacgcgaattcctcgtccctttctatctcaaataaatatgacaacgatgagctggacttaactaaggactttgatcttttgcatatcaaaagtaacggaaccatccacttaggtgccacccactggttgtctatcatgaaaggtgacccgtacctaaaacttttgtggggtcatatcttcgctatgagggaaaagttaaatgaatggtactaccaaaaaaattcgtactctaagctgaagtcaagcaaatgtcccatcaatcacgcgcaagcgccgccttctgccgctgccgccgctaccagaaaatgtcctgttgatcactccgcgttttcgtctggcatggtggccccaaaggaggagactcctcttcctaggaaatgtccagttgaccacaccatgttctcttcgggaatgattcctcccagagaggacacttcgtcccagaagaggtgtcccgttgaccacaccatgtattccgcaggaatgatgccgcccaaggacgagacaccttccccattttccactaaagctatgatagaccataacaagcatacaatgaatccgcctcagtcaaaatgtcctgtggaccatagaaactatatgaaggattatccctctgacatggcaaattcttcttcgaacccggcaagtcgttgccccattgaccattcaagcatgaaaaatacagcggccttaccagcttcaacgcacaataccatcccacaccaccaaccacagtccggatctcatgctcgttcgcatcccgcacaaagcaggaaacatgattcctacatgacagaatctgaagtcctcgcaacactttgtgagatgttgccaccaaagcgcgtcatcgcattattcatcgagaaattcttcaaacatttataccctgccattccaatcttagatgaacagaatttcaaaaatcacgtgaatcaaatgctttcgttgtcttcgatgaatcccacagttaacaactttggtatgagcatgccatcttcatctacactagagaaccaacccataacacaaatcaatcttccaaaactttccgattcttgtaacttaggtattctgataataatcttgagattgacatggctatccataccttctaattcctgcgaagtcgacctgggagaagaaagtggctcatttttagtgcccaacgaatctagcaatatgtctgcatctgcattgacctcgatggctaaagaagaatcacttctgctaaagcatgagacaccggtcgaggcactggagctatgtcaaaaatacttgattaaattcgatgaactttctagtatttccaataacaacgttaatttaaccacggtgcagtttgccattttttacaacttctatatgaaaagtgcctctaatgatttgactaccttgacaaataccaacaacactggcatggccaatcctggtcacgattccgagtctcaccagatcctattgtccaatattactcaaatggcctttagttgtgggttacacagagaccctgataattttcctcaattaaacgctaccattccagcaaccagccaggacgtgtctaacaacgggagcaaaaaggcaaaccctagcaccaatccaactttgaataacaacatgtctgctgccactaccaacagcagtagcagatctggcagtgctgattcaagaagtggttctaaccctgtgaacaagaaggaaaatcaggttagtatcgaaagatttaaacacacttggaggaaaatttggtattacattgttagcatggatgttaaccaatctctttccctggggagccctcgactactaagaaatctgagggatttcagcgatacaaagctaccaagtgcgtcaaggattgattatgttcgcgatatcaaagagttaatcattgtgaagaattttactctttttttccaaattgatttgtgtattattgctgtattaaatcacattttgaatgtttctttagcaagaagcgtgagaaaatttgaactggattcattgattaatttattgaaaaatctgacctatggtactgagaatgtcaatgatgtagtgagctccttgatcaacaaagggttattaccaacttcggaaggtggttctgtagattcaaataatgatgaaatttacggtctaccgaaactacccgatattctaaaccatggtcaacataaccaaaacttgtatgctgatggaagaaatacttctagtagtgatatagataagaaattggaccttcctcacgaatctacaacgagagctctattcttttccaagcatatgacaattagaatgttgctgtacttattgaactacattttgtttactcattatgaaccaatgggcagtgaagatcctggtactaatatcctagctaaggagtacgctcaagaggcattaaattttgccatggatggctacagaaactgcatgattttcttcaacaatatcagaaacaccaattcactattcgattacatgaatgttatcttgtcttacccttgtttggacattggacatcgttctttacaatttatcgtttgtttgatcctgagagctaaatgtggcccattgactggtatgcgtgaatcatcgatcattactaatggtacatcaagtggatttaatagttcggtagaagatgaggacgtcaaagttaaacaagaatcttctgatgaattgaaaaaagacgatttcatgaaagatgtaaatttggattcaggcgattcattagcagagattctaatgtcaagaatgctgctatttcaaaaactaacaaaacaactatcaaagaagtacaactacgctattcgtatgaacaaatccactggattctttgtctctttactagatacaccttcaaagaaatcagactcgaaatcgggtggtagttcattcatgttgggtaattggaaacatccaaaggtttcaaacatgagcggatttcttgctggtgacaaagaccaattacagaaatgccccgtgtaccaagatgcgctggggtttgttagtccaaccggtgctaatgaaggttctgctccgatgcaaggcatgtccttacagggctctactgctaggatgggagggacccagttgccaccaattagatcatacaaacctatcacgtacacaagtagtaatctacgtcgtatgaatgaaacgggtgaggcagaagctaagagaagaagatttaatgatggctatattgataataatagtaacaacgatatacctagaggaatcagcccaaaaccttcaaatgggctatcatcggtgcagccactattatcgtcattttccatgaaccagctaaacgggggtaccattccaacggttccatcgttaaccaacattacttcacaaatgggagctttaccatctttagataggatcaccactaatcaaataaatttgccagacccatctagagatgaagcatttgacaactccatcaagcaaatgacgcctatgacaagtgcattcatgaatgctaatactacaattccaagttcaactttaaacgggaatatgaacatgaatggagctggaactgcgaatacagatacaagtgccaacggcagtgctttatcgacactgacaagcccacaaggctcagacttagcatccaattctgctacacagtataaacctgacttagaagactttttgatgcaaaattctaactttaatgggctaatgataaatccttccagtctggtagaagttgttggtggatacaacgatcctaataaccttggaagaaatgacgcggttgattttctacccgttgataatgttgaaattgatggtgttggaataaaaatcaactatcatctactaactagtatttacgttactagtatattatcatatacggtgttagaagatgacgcaaatgatgagaaatag

SEQ ID NO: 140 - protein, 1502 aa, Saccharomyces cerevisiae
MSNTPYNSSVPSIASMTQSSVSRSPNMHTATTPGANTSSNSPPLHMSSDSSKIKRKRNRIPLSCTICRKRKVKCDKLRPHCQQCTKTGVAHLCHYMEQTWAEEAEKELLKDNELKKLRERVKSLEKTLSKVHSSPSSNSLKSYNTPESSNLFMGSDEHTTLVNANTGSASSASHMHQQQQQQQQQEQQQDFSRSANANANSSSLSISNKYDNDELDLTKDFDLLHIKSNGTIHLGATHWLSIMKGDPYLKLLWGHIFAMREKLNEWYYQKNSYSKLKSSKCPINHAQAPPSAAAAATRKCPVDHSAFSSGMVAPKEETPLPRKCPVDHTMFSSGMIPPREDTSSQKRCPVDHTMYSAGMMPPKDETPSPFSTKAMIDHNKHTMNPPQSKCPVDHRNYMKDYPSDMANSSSNPASRCPIDHSSMKNTAALPASTHNTIPHHQPQSGSHARSHPAQSRKHDSYMTESEVLATLCEMLPPKRVIALFIEKFFKHLYPAIPILDEQNFKNHVNQMLSLSSMNPTVNNFGMSMPSSSTLENQPITQINLPKLSDSCNLGILIIILRLTWLSIPSNSCEVDLGEESGSFLVPNESSNMSASALTSMAKEESLLLKHETPVEALELCQKYLIKFDELSSISNNNVNLTTVQFAIFYNFYMKSASNDLTTLTNTNNTGMANPGHDSESHQILLSNITQMAFSCGLHRDPDNFPQLNATIPATSQDVSNNGSKKANPSTNPTLNNNMSAATTNSSSRSGSADSRSGSNPVNKKENQVSIERFKHTWRKIWYYIVSMDVNQSLSLGSPRLLRNLRDFSDTKLPSASRIDYVRDIKELIIVKNFTLFFQIDLCIIAVLNHILNVSLARSVRKFELDSLINLLKNLTYGTENVNDVVSSLINKGLLPTSEGGSVDSNNDEIYGLPKLPDILNHGQHNQNLYADGRNTSSSDIDKKLDLPHESTTRALFFSKHMTIRMLLYLLNYILFTHYEPMGSEDPGTNILAKEYAQEALNFAMDGYRNCMIFFNNIRNTNSLFDYMNVILSYPCLDIGHRSLQFIVCLILRAKCGPLTGMRESSIITNGTSSGFNSSVEDEDVKVKQESSDELKKDDFMKDVNLDSGDSLAEILMSRMLLFQKLTKQLSKKYNYAIRMNKSTGFFVSLLDTPSKKSDSKSGGSSFMLGNWKHPKVSNMSGFLAGDKDQLQKCPVYQDALGFVSPTGANEGSAPMQGMSLQGSTARMGGTQLPPIRSYKPITYTSSNLRRMNETGEAEAKRRRFNDGYIDNNSNNDIPRGISPKPSNGLSSVQPLLSSFSMNQLNGGTIPTVPSLTNITSQMGALPSLDRITTNQINLPDPSRDEAFDNSIKQMTPMTSAFMNANTTIPSSTLNGNMNMNGAGTANTDTSANGSALSTLTSPQGSDLASNSATQYKPDLEDFLMQNSNFNGLMINPSSLVEVVGGYNDPNNLGRNDAVDFLPVDNVEIDGVGIKINYHLLTSIYVTSILSYTVLEDDANDEK

SEQ ID NO: 141 - DNA, 1665 bp, Saccharomyces cerevisiae
atgaccgcaaagacttttctactacaggcctccgctagtcgccctcgtagtaaccattttaaaaatgagcataataatattccattggcgcctgtaccgatcgccccaaataccaaccatcataacaatagttcgctggaattcgaaaacgatggcagtaaaaagaagaagaagtctagcttggtggttagaacttcaaaacattgggttttgcccccaagaccaagacctggtagaagatcatcttctcacaacactctacctgccaacaacaccaataatattttaaatgttggccctaacagcaggaacagtagtaataataataataataataacatcatttcgaataggaaacaagcttccaaagaaaagaggaaaataccaagacatatccagacaatcgatgaaaagctaataaacgactcgaattacctcgcatttttgaagttcgatgacttggaaaatgaaaagtttcattcttctgcctcctccatttcatctccatcttattcatctccatctttttcaagttatagaaatagaaaaaaatcagaattcatggacgatgaaagctgcaccgatgtggaaaccattgctgctcacaacagtctgctaacaaaaaaccatcatatagattcttcttcaaatgttcacgcaccacccacgaaaaaatcaaagttgaacgactttgatttattgtccttatcttccacatcttcatcggccactccggtcccacagttgacaaaagatttgaacatgaacctaaattttcataagatccctcataaggcttcattccctgattctccagcagatttctctccagcagattcagtctcgttgattagaaaccactccttgcctactaatttgcaagttaaggacaaaattgaggatttgaacgagattaaattctttaacgatttcgagaaacttgagtttttcaataagtatgccaaagtcaacacgaataacgacgttaacgaaaataatgatctctggaattcttacttacagtctatggacgatacaacaggtaagaacagtggcaattaccaacaagtggacaatgacgataatatgtctttattgaatctgccaattttggaggaaaccgtatcttcagggcaagatgataaggttgagccagatgaagaagacatttggaattatttaccaagttcaagttcacaacaagaagattcatcacgtgctttgaaaaaaaatactaattctgagaaggcgaacatccaagcaaagaacgatgaaacctatctgtttcttcaggatcaggatgaaagcgctgattcgcatcaccatgacgagttaggttcagaaatcactttggctgacaataagttttcttatttgcccccaactctagaagagttgatggaagagcaggactgtaacaatggcagatcttttaaaaatttcatgttttccaacgataccggtattgacggtagtgccggtactgatgacgactacaccaaagttctgaaatccaaaaaaatttctacgtcgaagtcgaacgctaacctttatgacttaaacgataacaacaatgatgcaactgccaccaatgaacttgatcaaagcagtttcatcgacgaccttgacgaagatgtcgattttttaaaggtacaagtattttga

SEQ ID NO: 142 - protein, 554 aa, Saccharomyces cerevisiae
MTAKTFLLQASASRPRSNHFKNEHNNIPLAPVPIAPNTNHHNNSSLEFENDGSKKKKKSSLVVRTSKHWVLPPRPRPGRRSSSHNTLPANNTNNILNVGPNSRNSSNNNNNNNIISNRKQASKEKRKIPRHIQTIDEKLINDSNYLAFLKFDDLENEKFHSSASSISSPSYSSPSFSSYRNRKKSEFMDDESCTDVETIAAHNSLLTKNHHIDSSSNVHAPPTKKSKLNDFDLLSLSSTSSSATPVPQLTKDLNMNLNFHKIPHKASFPDSPADFSPADSVSLIRNHSLPTNLQVKDKIEDLNEIKFFNDFEKLEFFNKYAKVNTNNDVNENNDLWNSYLQSMDDTTGKNSGNYQQVDNDDNMSLLNLPILEETVSSGQDDKVEPDEEDIWNYLPSSSSQQEDSSRALKKNTNSEKANIQAKNDETYLFLQDQDESADSHHHDELGSEITLADNKFSYLPPTLEELMEEQDCNNGRSFKNFMFSNDTGIDGSAGTDDDYTKVLKSKKISTSKSNANLYDLNDNNNDATATNELDQSSFIDDLDEDVDFLKVQVF

SEQ ID NO: 143 - DNA, 1812 bp, Saccharomyces cerevisiae
atgcctagaaacccattgaaaaaggaatattgggcagatgtagttgacggattcaagccggctacttctccagccttcgagaatgaaaaagaatctactacatttgttaccgaactaacttccaaaaccgattctgcatttccattaagtagcaaggattcacctggcataaaccaaaccacaaacgatattacctcttcagatcgcttccgtcgtaatgaagacacagagcaggaagacatcaacaacaccaacctgagtaaagatctatccgtgagacatcttttaactctagctgtcgggggtgcaataggtactggtttatatgtgaatacgggtgctgctttatctacaggtggtccggccagtttagttattgattgggttattatcagtacatgtctttttactgtgattaactctcttggtgagctgtccgctgcttttcccgttgttggtgggttcaatgtttacagtatgcgttttattgagccttcatttgcattcgcagtgaacttaaactatttagcacaatggctagttcttctacccttggaattagtggccgcatctattactataaaatactggaatgataaaattaattccgacgcctgggttgctatcttttatgccaccattgcactggctaatatgttggatgttaagtcatttggtgagaccgaatttgtattgtccatgattaaaatcctctccatcattggctttactatcttaggtattgttttgtcctgtggtggtgggcctcacggcggttacattggtggtaaatactggcatgacccaggcgcttttgtagggcacagctcgggaactcagtttaaaggtttatgttcagtttttgttaccgctgccttttcttattccggtattgaaatgactgctgtctccgctgctgaaagtaaaaatccaagagaaaccattcccaaggcagcaaagagaactttttggctgattaccgcctcttatgtgactatattgactttgattggttgcttggttccatccaatgaccctaggttactaaacggttcaagttcagtggacgctgcctcatctcctctggttatcgcaattgaaaacgggggtattaaaggtctaccatcattaatgaacgccattattttgattgctgttgtttccgtggctaacagtgctgtttatgcatgttcaaggtgtatggtcgccatggctcatattggtaatttaccaaaatttttgaaccgtgttgacaaaaggggtagaccaatgaatgctatcttgttaactttgttttttggtttgctttcctttgtggcagcaagtgataagcaagctgaagtctttacatggttgagtgccttatctggtttatcgacaattttctgctggatggccattaatctttcccatattagatttcgccaagccatgaaagttcaagaaaggtctttagacgaattacccttcatttctcaaactggcgtcaagggatcctggtatggttttatcgttttatttctggttcttatagcatcgttttggacttctctgttcccattaggcggttcaggagccagcgcagaatcattctttgaaggatacttatcctttccaattttgattgtctgttacgttggacataaactgtatactagaaattggactttgatggtgaaactagaagatatggatcttgataccggcagaaaacaagtagatttgactcttcgtagggaagaaatgaggattgagcgagaaacattagcaaaaagatccttcgtaacaagatttttacatttctggtgttga

SEQ ID NO: 144 - protein, 603 aa, Saccharomyces cerevisiae
MPRNPLKKEYWADVVDGFKPATSPAFENEKESTTFVTELTSKTDSAFPLSSKDSPGINQTTNDITSSDRFRRNEDTEQEDINNTNLSKDLSVRHLLTLAVGGAIGTGLYVNTGAALSTGGPASLVIDWVIISTCLFTVINSLGELSAAFPVVGGFNVYSMRFIEPSFAFAVNLNYLAQWLVLLPLELVAASITIKYWNDKINSDAWVAIFYATIALANMLDVKSFGETEFVLSMIKILSIIGFTILGIVLSCGGGPHGGYIGGKYWHDPGAFVGHSSGTQFKGLCSVFVTAAFSYSGIEMTAVSAAESKNPRETIPKAAKRTFWLITASYVTILTLIGCLVPSNDPRLLNGSSSVDAASSPLVIAIENGGIKGLPSLMNAIILIAVVSVANSAVYACSRCMVAMAHIGNLPKFLNRVDKRGRPMNAILLTLFFGLLSFVAASDKQAEVFTWLSALSGLSTIFCWMAINLSHIRFRQAMKVQERSLDELPFISQTGVKGSWYGFIVLFLVLIASFWTSLFPLGGSGASAESFFEGYLSFPILIVCYVGHKLYTRNWTLMVKLEDMDLDTGRKQVDLTLRREEMRIERETLAKRSFVTRFLHFWC

SEQ ID NO: 145 - DNA, 1305 bp, Saccharomyces cerevisiae
atgccaaattttcaaaaacctttttctggttcttcggatggcaattctgtaatgaacgacctaggtaataaagtcgccatcaaggtttttgattgtagaagtgctcaagatggcagcgaagagcagaatgtaaatgtaaccacgaaccaaatgtatttaatgtttcaaagtaacaattacaacgtgccgccaccaaattacaataccgaggatttgggttctcaaggacctccgacgcatgcttattacgctccatttcagcatcccatccatcttcaacctcccgtgcctcctgtatataagaacaacacatattctgccacagaccagtatagtgactcctcgtttcctaatacttcaggccacactccagtaattgatagtaattactataatgatgctctggcttctatacctacaacaacgacgggtagtactacaatgactacagacaatggcaatactattgacagcgaagaatacattgataacatggaagtctttagtagcgaggaaaatgaaaacattgataatgtaaagcaaaccgatcttaaatctgaaaaggactcgagtcttctttcagcagcttcaatcgtgaaaaaggaacaattgtctggctttgaaaattttttgcctttatcgaagacagagtctcccttagttactgcagacgagattaaatcatctttgaatttggagaatattgacaatgctgacagtatgagcttcaagttaaaaacttcacctatacggaaacattttcatgttaaacccaaaagaataacaagggtgaggacaggaagggtatcacacaatataattgaaaagaaataccgttccaatattaatgataaaattgaacaattaaggagaactgtcccaacgctacgagtagcgtataaaaaatgtaacgatcttcccattacatctagagacctagcagacttagatggcctagagccagcaacaaaattgaataaggcgtccattttaacgaaatctattgaatatatttgtcatttagaaagaaagtgcctacagctaagcttggctaatcaacatttatcaaatgacacacgggattctttcgtccatcttaccgagccatctcaaccgttgagtgacaacagtagtagtgaacaagtacaaaagcaaaccagaagctgccaacgccaacggcagcggcagccacgacaacaacaaccattgcataacattcaatataatattccacatcaaaacggcctcatgagcggcaccaacaattcacatgatatggattttaacaacgcaggagacttttaa

SEQ ID NO: 146 - protein, 434 aa, Saccharomyces cerevisiae
MPNFQKPFSGSSDGNSVMNDLGNKVAIKVFDCRSAQDGSEEQNVNVTTNQMYLMFQSNNYNVPPPNYNTEDLGSQGPPTHAYYAPFQHPIHLQPPVPPVYKNNTYSATDQYSDSSFPNTSGHTPVIDSNYYNDALASIPTTTTGSTTMTTDNGNTIDSEEYIDNMEVFSSEENENIDNVKQTDLKSEKDSSLLSAASIVKKEQLSGFENFLPLSKTESPLVTADEIKSSLNLENIDNADSMSFKLKTSPIRKHFHVKPKRITRVRTGRVSHNIIEKKYRSNINDKIEQLRRTVPTLRVAYKKCNDLPITSRDLADLDGLEPATKLNKASILTKSIEYICHLERKCLQLSLANQHLSNDTRDSFVHLTEPSQPLSDNSSSEQVQKQTRSCQRQRQRQPRQQQPLHNIQYNIPHQNGLMSGTNNSHDMDFNNAGDF

SEQ ID NO: 147 - DNA, 1077 bp, Saccharomyces cerevisiae
atggatgcaacatcgaggatggagcagcctgatgtctttgtaagcaaactctaccacctgctgcaggggaacgcttactcgaacataatacaatggtcgactgatggcagcaagctcgtcatttggaatccggaccagttcaccaaagtcatcctagagcgattttttggtattcacacctttgcagcattcgttaagcaattgagcaaatataacttccagaaggcgggccgcccggactgcgtggagttttccaacattcattttcaaaaagataacattaatagcctctcactggttaaagctcatcagtctgccgccactcccaatgtcgccgccgtcaataatatgaataagcagtgtacttttcactgggaccctttcaaagtgaactccattctaagcaaggccatcggcaagccttccttcgagaaattagtgaaaaatgttgacaggcttcagggcaatcttgatgagcttaagtcgacaaacgcagatagtctgcgtattataagggaaattaacgccagcttacagacaatctcctaccaccagtttcacgcctaccaaaccgctaacttccttcaagaaaattttgaagccatcaaaaaggttgtatgcccggactcttgtctacaacaccagcaacgccaaccaaagcgccccaaacgctactcgttgctgttactaataccaaacgcatccgaattgtcagaaacacctttgatgcgcttcgccggcgtgttcgaatttatgaactgctctttggatacggccactcagtggcacccgcagttgcatcccgaggcatacgaccttcttttcgtcaccgtgtcgcccaacatgcaacaagaacatctcatctacttcaagagactgagaaacctactcccaagctttcctgtaatagccattattaacagacccgtctcccctcaagataccagcattgctccctccaactactctcgctattatttccaccattttttgcagttggggttcagtgacatcctagttagccccttcaccccaacacaacttataacgctcctttccaaacatcttcgaacgtga

SEQ ID NO: 148 - protein, 358 aa, Saccharomyces cerevisiae [sequence omitted]

SEQ ID NO: 149 - DNA, 1308 bp, Saccharomyces cerevisiae
atgaccactaacgaggaattcattaggacacagatattcggtacagttttcgagatcacaaatagatacaatgatttaaaccccgttgggatgggggcatttgggttggtttgctcagccacggacactttgacatctcagccagttgccattaagaaaatcatgaaacctttttccactgcagtgctggccaaaaggacatatcgtgaactaaaactactaaaacatctaagacacgagaacttgatttgccttcaggacatatttctttctccattggaagatatatattttgtcacggaattacaaggaacagatttacatagactcttgcaaacaagacccttggaaaagcaatttgttcagtatttcctataccaaattctaaggggtttaaaatacgttcactccgcgggcgtcattcatagagatttgaaaccgagcaacattctgattaatgaaaactgtgatttgaagatttgcgatttcggtctagcaagaattcaagaccctcaaatgacaggctatgtttccactagatactacagggcacctgaaatcatgctaacgtggcaaaaatatgacgtcgaggtcgacatttggtccgctggttgtatttttgccgaaatgattgaaggtaagcctttgttccctgggaaagatcatgttcaccaattttcgatcatcactgacttgttgggatctccgccaaaggatgtgataaatactatttgttccgaaaatactctaaaatttgttacttcgttaccacacagagatccaattccattttctgaaagatttaaaacagtcgaacctgatgccgtagaccttttggaaaaaatgctggtttttgatcctaagaagagaatcactgcggcggatgccttggctcatccttattcggctccttaccacgatccaacggatgaaccagtagccgatgccaagttcgattggcactttaatgacgctgatctgcctgtcgatacctggcgtgttatgatgtactcagaaatcctagacttccataagattggtggcagtgatggacagattgatatatctgccacgtttgatgaccaagttgctgcagccaccgctgccgcggcgcaggcacaggctcaggctcaggctcaagttcagttaaacatggctgcgcattcgcataatggcgctggcactactggaaatgatcactcagatatagctggtggaaacaaagtcagcgatcatgtagctgcaaatgacaccattacggactacggtaaccaggccatacagtacgctaatgagttccaacagtaa

SEQ ID NO: 150 - protein, 435 aa, Saccharomyces cerevisiae
MTTNEEFIRTQIFGTVFEITNRYNDLNPVGMGAFGLVCSATDTLTSQPVAIKKIMKPFSTAVLAKRTYRELKLLKHLRHENLICLQDIFLSPLEDIYFVTELQGTDLHRLLQTRPLEKQFVQYFLYQILRGLKYVHSAGVIHRDLKPSNILINENCDLKICDFGLARIQDPQMTGYVSTRYYRAPEIMLTWQKYDVEVDIWSAGCIFAEMIEGKPLFPGKDHVHQFSIITDLLGSPPKDVINTICSENTLKFVTSLPHRDPIPFSERFKTVEPDAVDLLEKMLVFDPKKRITAADALAHPYSAPYHDPTDEPVADAKFDWHFNDADLPVDTWRVMMYSEILDFHKIGGSDGQIDISATFDDQVAAATAAAAQAQAQAQAQVQLNMAAHSHNGAGTTGNDHSDIAGGNKVSDHVAANDTITDYGNQAIQYANEFQQ

SEQ ID NO: 151 - DNA, 4557 bp, Saccharomyces cerevisiae
atgactggtcacgtttcaaaaacgagccacgtacccaaaggtcgcccgtcttcattggccaagaaggcagctaaaagggccatggccaaagtaaattcgaatccaaaaagggcgtcggggcatttggagcgtgttgtacaatctgtgaacgacgctaccaaaagattatctcagcccgactctaccgtaagtgttgctacaaaatcatcaaagagaaaatccagagacacggtgggtccttggaaacttggcaaaacattggggaagggatcttctggtagggttcgcttggctaaaaatatggaaacaggacaattagctgccattaaaattgtccccaagaagaaagcctttgttcattgttctaataatggaactgttcctaattcttactcttcttccatggtcacttccaatgtatcttctccatcaatagcatctagagaacatagtaaccattctcaaacgaacccatatggcatagagagagaaatagtaatcatgaaattgatatctcacacaaacgttatggcattgtttgaagtttgggagaacaaatcagagctgtacctagttttggaatatgttgatggtggcgaattattcgattatctggtctcgaagggaaagctacctgaaagggaggctatccattacttcaagcagatagttgaaggtgtttcctattgtcattcttttaatatatgccatcgtgatctgaagcctgaaaatttattattagataaaaagaataggagaatcaaaattgctgatttcggcatggcagcattagagcttcctaataaacttttaaaaacttcatgtggctctccacactatgcgtctcctgaaattgttatgggtagaccatatcatggcggtcctagcgatgtctggtcctgcggtatcgttttatttgcattactcaccggtcatttaccatttaatgatgacaacatcaaaaagctgttgttgaaagttcaatcgggcaaatatcaaatgccctcaaatttatcttctgaggctcgtgatttgatatcaaaaatattggtaattgatccagaaaaaagaattaccactcaagagatattgaagcatcctctgatcaaaaaatatgatgatctcccagttaataaagtgctgaggaaaatgagaaaggataacatggcgaggggaaaatctaactcggatttgcatttgctaaataatgtctcgccctctattgtaactttacattcaaaaggggaaattgatgaatccatcttgaggagtttgcaaattttgtggcatggagtttctcgtgaactaatcactgccaagttgcttcaaaagccaatgtcggaggaaaaactattctactcactgttattacaatataaacaacgtcactcaatatcattgtcctcgtcaagcgaaaacaagaaatcagcaacagaaagtagcgtaaatgaacctaggattgaatacgcatccaaaactgccaataatacaggcctaaggagcgagaacaatgatgtgaagactttacattctctagaaattcattcagaagatacttcaacagtgaatcagaacaacgcaattacaggggttaatacagaaattaatgcccctgtattggcacaaaaatcgcaatttagtatcaatacgctcagtcaacctgaaagtgataaggctgaagcagaagctgtaacattaccacccgctattcccatattcaatgcttcttcatcaaggattttccgtaactcatacacctctatttcatcacgttcgagaagatcgctacgcttatcgaattccagattatcattgtccgcttcaacttctagagaaactgtgcatgataatgagatgcctctacctcaactgccgaagtcgccttcaagatattcattgtcaagaagggcaatccacgcctccccatctactaaatcaatacataaatcactttcgaggaagaatatagctgcaactgttgccgctagaagaacactacaaaactcggcttcaaagagatccttatactcattacagtcaatttcaaaacgttccttgaacctgaatgatttattagtctttgacgatcctctccctagtaagaaaccagcatccgaaaatgtgaataaatcagaaccccattcgttggaatcagactctgattttgagatcttatgcgatcagatcttatttggaaacgccttagataggatactcgaagaggaagaggacaatgaaaaagaacgcgacacccaaagacagaggcaaaacgatacaaaatcttcggcagacacttttacgatctctggggtgtctacaaataaggaaaatgagggcccggagtatccaaccaaaattgagaaaaatcaattcaatatgtcatataaaccatctgagaatatgtcagggctctcttcatttcctatctttgaaaaagaaaacacgttaagctcaagttatttggaagaacagaagccaaagagagcggccctttcagatatcacgaactcattcaataaaatgaataaacaggaaggtatgaggatagaaaaaaagattcaaagagaacaacttcaaaaaaaaaatgaccgcccgtcaccactcaaacctattcagcaccaagaacttcgtgtaaattctttgcctaatgatcaaggtaaaccgtccttatctctagatccccgccgtaacatctcccagccagtgaattcaaaagtggaatcactattgcagggactgaaattcaaaaaggagccagcctctcactggacccatgagagaggttccttgttcatgagtgaacatgtggaagacgaaaaaccagtcaaagcctcagatgtttcaatcgaaagttcatatgtacctttaacaacagtagcaacatcttcgagagatcccagtgttttagcagaatctagtacaattcaaaaaccaatgctgtctttaccttctagttttttgaacacatctatgacgttcaaaaatcttagccagatactcgctgatgacggtgatgataagcatctaagtgtgccacagaaccaatctagaagtgtagccatgtcacaccctttgcgaaaacaatctgccaaaatatctctaactccacggtctaatttgaacgccaatttatccgttaaacgtaatcagggctcacctggctcctatttgagtaatgatctggatggaatctctgatatgacatttgcgatggaaataccaacaaacacctttaccgctcaggcgattcaactgatgaacaacgacacggacaataataaaatcaatacttcgcccaaagcatcttcttttacaaaagaaaaagtaatcaaatcggcagcctatatctcgaaggaaaaagaaccagataatagcgatactaattatattccagattatactataccaaacacatatgatgaaaaagccattaatatttttgaagatgcgccctccgatgagggttcattaaatacatcttcttcagaaagcgattcacgagcaagtgtgcataggaaagcggtatctattgacactatggcgacaacaaacgttcttactcccgcgacaaatgttagagtaagtctttattggaataataacagttctggtatacccagagagactactgaagagatactttctaaacttagattgtcaccagaaaatccttctaatacacatatgcaaaagaggttttcttccacgcgtggtagtcgtgatagtaatgcattaggcatttctcaaagtttacagtcaatgttcaaagatttggaggaagatcaagatgggcatacttctcaagctgatattcttgaatcaagtatgagctattcaaagcgaagaccatctgaggaaagcgttaatccaaaacaacgagtgacaatgcttttcgatgaggaggaggaagaatctaaaaaagtaggtgggggaaaaattaaagaagagcataccaagctagacaataaaatatccgaggaatcttctcaacttgtgttgccggtggttgaaaaaaaggaaaatgcaaataatacagaaaataactactctaaaataccaaaaccctcaacgattaaagttacgaaggataccgctatggaatcaaatacacaaacccatacaaaaaagccaattctaaaaagtgtccaaaatgttgaagttgaagaagcgccttccagtgataaaaagaattggttcgtcaaactatttcaaaacttttcttctcataataatgctactaaggcatccaagaatcatgtaacgaatatatcatttgatgatgcgcatatgctaacattaaatgaattcaacaagaatagtatcgactatcaattaaagaacctagatcacaaatttgggagaaaggtggtggaatacgattgtaaatttgtaaaaggcaacttcaaattcaaaatcaagattactagcacacccaatgcatcatcggtaattactgtaaaaaaaagaagcaaacattcaaacacaagttccaataaagcctttgaaaagtttaatgatgatgtggagagagtaattcgaaatgccggacgttcataa

SEQ ID NO: 152 - protein, 1518 aa, Saccharomyces cerevisiae
MTGHVSKTSHVPKGRPSSLAKKAAKRAMAKVNSNPKRASGHLERVVQSVNDATKRLSQPDSTVSVATKSSKRKSRDTVGPWKLGKTLGKGSSGRVRLAKNMETGQLAAIKIVPKKKAFVHCSNNGTVPNSYSSSMVTSNVSSPSIASREHSNHSQTNPYGIEREIVIMKLISHTNVMALFEVWENKSELYLVLEYVDGGELFDYLVSKGKLPEREAIHYFKQIVEGVSYCHSFNICHRDLKPENLLLDKKNRRIKIADFGMAALELPNKLLKTSCGSPHYASPEIVMGRPYHGGPSDVWSCGIVLFALLTGHLPFNDDNIKKLLLKVQSGKYQMPSNLSSEARDLISKILVIDPEKRITTQEILKHPLIKKYDDLPVNKVLRKMRKDNMARGKSNSDLHLLNNVSPSIVTLHSKGEIDESILRSLQILWHGVSRELITAKLLQKPMSEEKLFYSLLLQYKQRHSISLSSSSENKKSATESSVNEPRIEYASKTANNTGLRSENNDVKTLHSLEIHSEDTSTVNQNNAITGVNTEINAPVLAQKSQFSINTLSQPESDKAEAEAVTLPPAIPIFNASSSRIFRNSYTSISSRSRRSLRLSNSRLSLSASTSRETVHDNEMPLPQLPKSPSRYSLSRRAIHASPSTKSIHKSLSRKNIAATVAARRTLQNSASKRSLYSLQSISKRSLNLNDLLVFDDPLPSKKPASENVNKSEPHSLESDSDFEILCDQILFGNALDRILEEEEDNEKERDTQRQRQNDTKSSADTFTISGVSTNKENEGPEYPTKIEKNQFNMSYKPSENMSGLSSFPIFEKENTLSSSYLEEQKPKRAALSDITNSFNKMNKQEGMRIEKKIQREQLQKKNDRPSPLKPIQHQELRVNSLPNDQGKPSLSLDPRRNISQPVNSKVESLLQGLKFKKEPASHWTHERGSLFMSEHVEDEKPVKASDVSIESSYVPLTTVATSSRDPSVLAESSTIQKPMLSLPSSFLNTSMTFKNLSQILADDGDDKHLSVPQNQSRSVAMSHPLRKQSAKISLTPRSNLNANLSVKRNQGSPGSYLSNDLDGISDMTFAMEIPTNTFTAQAIQLMNNDTDNNKINTSPKASSFTKEKVIKSAAYISKEKEPDNSDTNYIPDYTIPNTYDEKAINIFEDAPSDEGSLNTSSSESDSRASVHRKAVSIDTMATTNVLTPATNVRVSLYWNNNSSGIPRETTEEILSKLRLSPENPSNTHMQKRFSSTRGSRDSNALGISQSLQSMFKDLEEDQDGHTSQADILESSMSYSKRRPSEESVNPKQRVTMLFDEEEEESKKVGGGKIKEEHTKLDNKISEESSQLVLPVVEKKENANNTENNYSKIPKPSTIKVTKDTAMESNTQTHTKKPILKSVQNVEVEEAPSSDKKNWFVKLFQNFSSHNNATKASKNHVTNISFDDAHMLTLNEFNKNSIDYQLKNLDHKFGRKVVEYDCKFVKGNFKFKIKITSTPNASSVITVKKRSKHSNTSSNKAFEKFNDDVERVIRNAGRS

SEQ ID NO: 153 - DNA, 1461 bp, Saccharomyces cerevisiae
atggttcatttaggtccaaaaaaaccacaagccagaaagggttccatggccgatgtgccaaaggaattgatgcaacaaattgagaattttgaaaaaattttcactgttccaactgaaactttacaagccgttaccaagcacttcatttccgaattggaaaagggtttgtccaagaagggtggtaacattccaatgattccaggttgggttatggatttcccaactggtaaggaatccggtgatttcttggccattgatttgggtggtaccaacttgagagttgtcttagtcaagttgggcggtgaccgtacctttgacaccactcaatctaagtacagattaccagatgctatgagaactactcaaaatccagacgaattgtgggaatttattgccgactctttgaaagcttttattgatgagcaattcccacaaggtatctctgagccaattccattgggtttcaccttttctttcccagcttctcaaaacaaaatcaatgaaggtatcttgcaaagatggactaaaggttttgatattccaaacattgaaaaccacgatgttgttccaatgttgcaaaagcaaatcactaagaggaatatcccaattgaagttgttgctttgataaacgacactaccggtactttggttgcttcttactacactgacccagaaactaagatgggtgttatcttcggtactggtgtcaatggtgcttactacgatgtttgttccgatatcgaaaagctacaaggaaaactatctgatgacattccaccatctgctccaatggccatcaactgtgaatacggttccttcgataatgaacatgtcgttttgccaagaactaaatacgatatcaccattgatgaagaatctccaagaccaggccaacaaacctttgaaaaaatgtcttctggttactacttaggtgaaattttgcgtttggccttgatggacatgtacaaacaaggtttcatcttcaagaaccaagacttgtctaagttcgacaagcctttcgtcatggacacttcttacccagccagaatcgaggaagatccattcgagaacctagaagataccgatgacttgttccaaaatgagttcggtatcaacactactgttcaagaacgtaaattgatcagacgtttatctgaattgattggtgctagagctgctagattgtccgtttgtggtattgctgctatctgtcaaaagagaggttacaagaccggtcacatcgctgcagacggttccgtttacaacagatacccaggtttcaaagaaaaggctgccaatgctttgaaggacatttacggctggactcaaacctcactagacgactacccaatcaagattgttcctgctgaagatggttccggtgctggtgccgctgttattgctgctttggcccaaaaaagaattgctgaaggtaagtccgttggtatcatcggtgcttaa

SEQ ID NO: 154 - protein, 486 aa, Saccharomyces cerevisiae
MVHLGPKKPQARKGSMADVPKELMQQIENFEKIFTVPTETLQAVTKHFISELEKGLSKKGGNIPMIPGWVMDFPTGKESGDFLAIDLGGTNLRVVLVKLGGDRTFDTTQSKYRLPDAMRTTQNPDELWEFIADSLKAFIDEQFPQGISEPIPLGFTFSFPASQNKINEGILQRWTKGFDIPNIENHDVVPMLQKQITKRNIPIEVVALINDTTGTLVASYYTDPETKMGVIFGTGVNGAYYDVCSDIEKLQGKLSDDIPPSAPMAINCEYGSFDNEHVVLPRTKYDITIDEESPRPGQQTFEKMSSGYYLGEILRLALMDMYKQGFIFKNQDLSKFDKPFVMDTSYPARIEEDPFENLEDTDDLFQNEFGINTTVQERKLIRRLSELIGARAARLSVCGIAAICQKRGYKTGHIAADGSVYNRYPGFKEKAANALKDIYGWTQTSLDDYPIKIVPAEDGSGAGAAVIAALAQKRIAEGKSVGIIGA

SEQ ID NO: 155 - DNA, 1083 bp, Saccharomyces cerevisiae
atgcaagcggatatgcatggaaaacttcacgctgccttagaagatggtttcttcctctttccttttgaacagcaacaacaacctaacatttattatgacacaaccaccgatcaagaagaccgtccttgtttttcttttggatctacaatttcccctagaagttggcattttgaaaagtctgacaaaattgcctcatctcagctgcagaacttggttcatacacaaccaattcatttaattaatcctcaaatattgttcaatgaagagtttctgaatttggaaaatattgattctcagcctatttccaaggaaacgaaaactacgaaggactgcacaatggcaactggtcctgaaagaggaaaaaagagctctgaaagtaccagatcctcttcattatcatctcttttttctaatgatgaatccgcatctacgttccactcatcattcaataaccatgataactttcaaaagagcaacagaaatggagatgatatcgatattagtgacacaataaaatatgaaactaatacaaatgcacaaaaagatatcaaaatattccaagaaaattttgaattcaatgaattcccatacacacaagacttctacccatataccactaattatacctattcaaaacccacaaatattcatgaatcaataaattcaaaaaacacggattcatactcccaatatcaagatcagtttccaccacatactgataacatacattcctttaataatcgtcactatagcaaccataaaagcactaattgtaattactataataataccagcaataataacaacgcctccgataatgtatatgaggcagatccatttatagatgaacctcaggtgccctcctactattacccattagaaattgccttcgacgttgaaaaatcaccaccgccatcactacaaaaattaaattcaaaagagttagaattcctaaaaaagttgaactccaaactgtcaagatatgctgcggcttactccttcagcagttctaatgatcaagattattatgacaaggtcaggtttcaagaaatatcctacaagtttagtaaaacctattcttaa

SEQ ID NO: 156 - protein, 360 aa, Saccharomyces cerevisiae
MQADMHGKLHAALEDGFFLFPFEQQQQPNIYYDTTTDQEDRPCFSFGSTISPRSWHFEKSDKIASSQLQNLVHTQPIHLINPQILFNEEFLNLENIDSQPISKETKTTKDCTMATGPERGKKSSESTRSSSLSSLFSNDESASTFHSSFNNHDNFQKSNRNGDDIDISDTIKYETNTNAQKDIKIFQENFEFNEFPYTQDFYPYTTNYTYSKPTNIHESINSKNTDSYSQYQDQFPPHTDNIHSFNNRHYSNHKSTNCNYYNNTSNNNNASDNVYEADPFIDEPQVPSYYYPLEIAFDVEKSPPPSLQKLNSKELEFLKKLNSKLSRYAAAYSFSSSNDQDYYDKVRFQEISYKFSKTYS

SEQ ID NO: 157 - DNA, 1803 bp, Saccharomyces cerevisiae
atgattaacgataaactagtacattttctgatccagaattatgatgacatcctaagagcaccgctttctggacagctcaaagatgtgtattcactgtacatcagtggcggatacgatgatgagatgcagaagttgagaaacgataaagacgaggtcttacagtttgaacagttttggaatgatcttcaggatattatatttgcaacgccgcagtccattcaatttgaccagaatctattagtggcagataggccagaaaaaattgtttacctggacgttttttccttgaaaattctctataacaagttccatgccttctactatacattaaaatcgtccagttcttcatgtgaagaaaaagtgtcgagtttaacaacaaaaccggaagctgattcggaaaaagaccaactgctgggtagactgcttggagtcctgaactgggacgttaacgtcagcaaccaggggttaccacgtgaacaactgagcaatcgcttacaaaatttattgagggaaaaaccatcatcttttcagcttgctaaagaaagagccaaatacacgaccgaggtcattgaatacatcccgatatgtagtgactattcgcatgcatctctattgtccacctcggtgtacattgtcaataacaaaatcgtttctttacaatggtccaaaatatccgcatgtcaggaaaatcacccaggattaattgagtgcattcaatcaaaaattcactttatccctaatatcaaaccacaaactgatatttcgttaggagattgttcctatttggatacctgtcataaattaaatacgtgtcgatacattcattacctgcaatatattccgtcatgcttgcaagagcgagctgatcgtgaaactgcgagtgaaaataaaagaatacggtcaaacgtttccattccattttatactctgggcaattgctccgcacattgtatcaaaaaggctttacctgcacagtggatccgttgcgatgtgcggaaatttgattttagggttcttggaaagttttcggtagttattgcagatcctgcatggaatatccatatgaacctaccatacggtacttgcaacgatattgaactattaggtttgcctttgcacgaactacaagatgaaggtattatttttctttgggtgacgggtagagctatagaattgggtaaagagtctttgaataactggggttacaacgtgataaatgaagtttcatggataaagacaaaccaactgggtagaacaattgttacaggtcgtacgggtcattggttaaatcattctaaggagcatttattggtgggcttaaagggtaatccaaagtggatcaacaaacatattgacgtcgatttgatcgtatcaatgaccagagagactagtagaaagcctgatgaactgtatggtatagcagaacggttggcaggcacccatgccagaaaactagagatattcggaagggatcacaatacgcggcctggctggtttaccatcggaaaccagttgacaggaaattgcatttacgaaatggatgtcgagaggaagtaccaggagtttatgaagagcaaaactggaaccagccacactggtactaaaaaaatcgacaaaaagcaaccttcaaaattacagcagcagcatcagcagcagtattggaataatatggatatggggagtggtaagtattatgctgaggccaagcagaatcctatgaatcaaaaacatactccctttgaatccaaacagcaacaaaaacaacaattccaaacactaaataacctatattttgctcagtaa

SEQ ID NO: 158 - protein, 600 aa, Saccharomyces cerevisiae
MINDKLVHFLIQNYDDILRAPLSGQLKDVYSLYISGGYDDEMQKLRNDKDEVLQFEQFWNDLQDIIFATPQSIQFDQNLLVADRPEKIVYLDVFSLKILYNKFHAFYYTLKSSSSSCEEKVSSLTTKPEADSEKDQLLGRLLGVLNWDVNVSNQGLPREQLSNRLQNLLREKPSSFQLAKERAKYTTEVIEYIPICSDYSHASLLSTSVYIVNNKIVSLQWSKISACQENHPGLIECIQSKIHFIPNIKPQTDISLGDCSYLDTCHKLNTCRYIHYLQYIPSCLQERADRETASENKRIRSNVSIPFYTLGNCSAHCIKKALPAQWIRCDVRKFDFRVLGKFSVVIADPAWNIHMNLPYGTCNDIELLGLPLHELQDEGIIFLWVTGRAIELGKESLNNWGYNVINEVSWIKTNQLGRTIVTGRTGHWLNHSKEHLLVGLKGNPKWINKHIDVDLIVSMTRETSRKPDELYGIAERLAGTHARKLEIFGRDHNTRPGWFTIGNQLTGNCIYEMDVERKYQEFMKSKTGTSHTGTKKIDKKQPSKLQQQHQQQYWNNMDMGSGKYYAEAKQNPMNQKHTPFESKQQQKQQFQTLNNLYFAQ

SEQ ID NO: 159 - DNA, 915 bp, Saccharomyces cerevisiae
atgcaacaagcaactgggaacgaattactgggtatcctagatctggataacgatatagactttgaaactgcttaccaaatgctcagcagtaacttcgacgaccaaatgtctgcgcacatacatgaaaacacgtttagtgcaacttcccctcctctgttaacacacgagctcggcataattcctaacgtagcaaccgtgcaaccctctcacgtagaaactatacctgccgataaccaaactcatcatgctcctttgcatactcatgcacactatctaaatcacaaccctcatcaaccaagcatgggttttgatcaagcgcttggtctcaagttgtctccttccagttcggggttgttgagcacgaatgaatcgaatgccattgaacagtttttagacaatctaatatcacaggatatgatgtcttccaacgcttccatgaactccgaatcacatctacatataagatcaccaaaaaagcagcataggtataccgaattaaatcaaagatatcctgaaacacatccacacagtaacacaggggagttacccacaaacacagcagatgtgccaactgagttcaccacgagggaaggacctcatcagcctatcggcaatgaccactacaacccgccaccgttttcagtacctgagatacgaatcccagactctgatattccagccaatatcgaggacgaccctgtgaaggtacggaaatggaaacacgttcaaatggagaagatacgaagaataaacaccaaagaagcctttgaaaggctcattaaatcagtaaggaccccaccgaaggaaaacgggaaaagaattcccaagcatattcttttaacttgtgtaatgaacgatatcaagtccattagaagcgcaaatgaagcactacagcacatactggatgattcctga

SEQ ID NO: 160 - protein, 304 aa, Saccharomyces cerevisiae
MQQATGNELLGILDLDNDIDFETAYQMLSSNFDDQMSAHIHENTFSATSPPLLTHELGIIPNVATVQPSHVETIPADNQTHHAPLHTHAHYLNHNPHQPSMGFDQALGLKLSPSSSGLLSTNESNAIEQFLDNLISQDMMSSNASMNSESHLHIRSPKKQHRYTELNQRYPETHPHSNTGELPTNTADVPTEFTTREGPHQPIGNDHYNPPPFSVPEIRIPDSDIPANIEDDPVKVRKWKHVQMEKIRRINTKEAFERLIKSVRTPPKENGKRIPKHILLTCVMNDIKSIRSANEALQHILDDS

SEQ ID NO: 161 - DNA, 1602 bp, Saccharomyces cerevisiae
atgaacttgtggagacatagtccagaagaattggctgcttacaatagctgtcatccaatgaagctaggttcaggggtgctgatacaattgcctctttatgacaattcggcagtatatgcagaagatattacttttaggagtttctgctgtgaaagagtgcccgtttatgtatctacggtgctaagaaactcttccccatataggtatcttgatgaggtgatcaatgactggcaaaaattcattcaagtaagcgattatgtcggcggttctgctgagtatgcgatttatgctgtgattttgtcgataacttctaattttgtcatcacagtgttcctgactgtgatatgctgtataaatatcagcgggcgcgcatataagagaattctacaactactgaggatagcctcgttgttagcctcgttgaacttaacgatttttatcacgaaggtgttgcggagattggaaaaagagcacaatgtctatggtgtcgttcgggctcattccattatgcacatcttttccgatgatatgacatttgttgtcttggatttcttggctactttaatgttccaattttgccaagtcggcattgtcattaggctatttcaaagagctcaggaaaagagaataattttttttattggggtgatattaacaataaccgcaaatattttatgggtaattccaccgtttgctaaccatactacaaaacacagaaatgactggcagattctgcggccatttgtttaccttttccgtattgccatcgccacgtcatatgcatcaatcgtcatttatcacatctggcagaaaaaaaaattgtggtttaaattcaatcaaatgggtttacttacgctattgactattcttgtggtgcttctattaccgggtttcttccttgccgatgtgtcgaacttatggatatcggaactgggtgaagtgtttaacacgacatgctatgtcacttcgaccgtgatcacatgggagtggctggatagattaaatgttttggaaagaaaagaggaagcgcaaagcattttgggaagacctatcttcgaggaagagcaacaagactatcggtttgccaagtacgccttaagggttcaaaacgctttaaccaggagggaatctcaggacgcatcaacggatcggcacgatacgtcaagtaattcggaagtatgtgatttacagaccatatcacgctacgacccagaagatcagatatcagtgggcagaagcattgatcgaatgcatttcaatgataggggaacttataaagatgtagcgctgaagaaattaggctatgcgcgtgataaaattttatactttacagaccaaatcgtccagaaaagcgtaggccacaataatagcagcagctcgaaaaatgaaaaaaccaaacagagaaaggccatggtcaggaaacggttgggattagacaaaccaggcatatacatttattcgacaaaggatgtcgttttcaattcagatgaagatgacgatgagaacgcggaagatgaagatgacgatgaatatgaagttggcagtgaaggcaataacaatagctctgccacttttaccagcgaccatataggccatatttga

SEQ ID NO: 162 - protein, 533 aa, Saccharomyces cerevisiae
MNLWRHSPEELAAYNSCHPMKLGSGVLIQLPLYDNSAVYAEDITFRSFCCERVPVYVSTVLRNSSPYRYLDEVINDWQKFIQVSDYVGGSAEYAIYAVILSITSNFVITVFLTVICCINISGRAYKRILQLLRIASLLASLNLTIFITKVLRRLEKEHNVYGVVRAHSIMHIFSDDMTFVVLDFLATLMFQFCQVGIVIRLFQRAQEKRIIFFIGVILTITANILWVIPPFANHTTKHRNDWQILRPFVYLFRIAIATSYASIVIYHIWQKKKLWFKFNQMGLLTLLTILVVLLLPGFFLADVSNLWISELGEVFNTTCYVTSTVITWEWLDRLNVLERKEEAQSILGRPIFEEEQQDYRFAKYALRVQNALTRRESQDASTDRHDTSSNSEVCDLQTISRYDPEDQISVGRSIDRMHFNDRGTYKDVALKKLGYARDKILYFTDQIVQKSVGHNNSSSSKNEKTKQRKAMVRKRLGLDKPGIYIYSTKDVVFNSDEDDDENAEDEDDDEYEVGSEGNNNSSATFTSDHIGHI

SEQ ID NO: 163 - DNA, 609 bp, Saccharomyces cerevisiae
atgtctgcattacctccagtatactcattccctccactatatacccgtcaacccaattctttaacaaggagacaacagataagtacgtggatagacatcatatcacaatattgcaagaccaagaaaatttggtacatgtctgttgacgggactgtaatcaatgacaacgaactagatagtggaagtacagataatgacgattcaaaaaaaatctcgaaaaatctttttaataatgaggacatccaaagatctgtatcacaggtatttattgatgaaatttggtcgcaaatgaccaaagaaggcaaatgcttaccgattgaccaaagtggtaggagaagcagcaataccaccactacgagatattttatattatggaagagcttagacagttgggcttctttgatactacagtggttcgaagactctggaaaactgaatcaagtcattacgttatacgaattgagtgaaggtgatgaaacagtcaattgggagttccatagaatgcccgaaagcttgctctattattgtttgaagcccctatgcgatagaaatagggccacaatgctgaaagatgaaaatgataaagtaattgccattaaggttgtttaa

SEQ ID NO: 164 - protein, 202 aa, Saccharomyces cerevisiae
MSALPPVYSFPPLYTRQPNSLTRRQQISTWIDIISQYCKTKKIWYMSVDGTVINDNELDSGSTDNDDSKKISKNLFNNEDIQRSVSQVFIDEIWSQMTKEGKCLPIDQSGRRSSNTTTTRYFILWKSLDSWASLILQWFEDSGKLNQVITLYELSEGDETVNWEFHRMPESLLYYCLKPLCDRNRATMLKDENDKVIAIKVV

SEQ ID NO: 165 - DNA, 1986 bp, Saccharomyces cerevisiae
atgagtgaactgcttgccattccacttaagcgaactttagaagtggactttgccacggagttgtcaaaactaattgatactacttcctttcaaacggcatcctttttccaatcagacatactcaaagttgttgatgcaagaaacaatgcgattgcacccgatatctcaatcgacggtctttctgcactgaaggaatactatgtaatattgttgcaattagagaaaaagtttcccaataatcaaatagaatttacatggtttcaaacgctatcacaaaaatctcgtggtactagtcaatactcattacaatgggaaaaattaaccattatttataatattggttgcatgtattcactgttggctctaaatagcaacaatgatgcagccgaatccctcaaaacgtcatgtctgtacttccagaatgccgccggatgctttaaacatgttttagaccaccaaaaaaatcttgagacaatcccagtggtagatgacgccacattgaacgctttaacctccctgatgctagcacaagcgcaagaatgcttctggtttaaagccgtgcaagataaacacaaggactccttaatcgcgaagttgtcacaacagatcgtggacttctactgcgaggctattaatgacgcccaaagggggaaacttattagaagtgattggataaaccacttaaaggctaaaaaggcttactttagtgcggtgacttattacagaatagccttatcttttaatgagaagaagcagttcggaaatgttgtgaaagctctgcaaatgggattgcaatttataaatgaatcaacactatcttcgcaagctaagtttaaaactgttgtcgaatcttctctgaaagaagcccaaagagacaatgaattcatctacttacaagaagttccttcggaattaccatcgatcaaaccagctctcatggttaaaccatcttcttcagcaacattgttgccttctattaaaaaggatgagactttattcaaagacctaatccctatagaagtgatggaatattgcacagcatacaatgaaaggcaagatgaatacgttgaacaacgtgttaccaatccccttgcttccctaaataaactattgaaggagtccttgactactttccaaataccacaagggcttacaaaggtgagtgaagcagaactgagtcattaccaggcatcactgaataatcttctcattaataataaaaatgtgcaggtacaactcgataacattgagcaaattttaaatgaagaagcatttactgacaatcagctccgactaaaacacggaaccttaaattggactttacccgaatcttcaactactaacacagcatattatgaaaaactaaaaaagctgagaggataccttgatgaaggtagtgcgattgacaaacaaacaaatgaactatttcaaagcatcgataaaaatttgattggatcagagatcaggttaccggaatctaatgatcctctaacgaataagattaagatgatcatacaggaaagaaatgattatattgataggacgaggcggaaatcttcagaatatagaatacttccaaagatcattacatcgtataaaaaaaatggaacagtcgactttgaacccattttcataggccatttaaaatactttgacgaagatttaagatacgttaatagtacaaaggaagaaaatatcaaacttattgaggaagtaaacctaagtaagaagaataaccccggcagaagcgggattgaaccaaagaaaatggtaagaatagatcccagagagctatatattgaagatctgagatattccttcaaactgcttgatgaggtgaaagaaaatttaagtgccggcacagcattttacgaaaatttaattacttctaccagcaatctgtacaatgaggtacaggaatatgatacagcaagaagagcagaaaaagctaggcttgataagagtttgacatttgaagaccaatga

SEQ ID NO: 166 - protein, 661 aa, Saccharomyces cerevisiae
MSELLAIPLKRTLEVDFATELSKLIDTTSFQTASFFQSDILKVVDARNNAIAPDISIDGLSALKEYYVILLQLEKKFPNNQIEFTWFQTLSQKSRGTSQYSLQWEKLTIIYNIGCMYSLLALNSNNDAAESLKTSCLYFQNAAGCFKHVLDHQKNLETIPVVDDATLNALTSLMLAQAQECFWFKAVQDKHKDSLIAKLSQQIVDFYCEAINDAQRGKLIRSDWINHLKAKKAYFSAVTYYRIALSFNEKKQFGNVVKALQMGLQFINESTLSSQAKFKTVVESSLKEAQRDNEFIYLQEVPSELPSIKPALMVKPSSSATLLPSIKKDETLFKDLIPIEVMEYCTAYNERQDEYVEQRVTNPLASLNKLLKESLTTFQIPQGLTKVSEAELSHYQASLNNLLINNKNVQVQLDNIEQILNEEAFTDNQLRLKHGTLNWTLPESSTTNTAYYEKLKKLRGYLDEGSAIDKQTNELFQSIDKNLIGSEIRLPESNDPLTNKIKMIIQERNDYIDRTRRKSSEYRILPKIITSYKKNGTVDFEPIFIGHLKYFDEDLRYVNSTKEENIKLIEEVNLSKKNNPGRSGIEPKKMVRIDPRELYIEDLRYSFKLLDEVKENLSAGTAFYENLITSTSNLYNEVQEYDTARRAEKARLDKSLTFEDQ

SEQ ID NO: 167 - DNA, 1377 bp, Saccharomyces cerevisiae
atgtaccaaggcccaccgcaaccgcctcctcaagctgtgccgatgccttacattgtgaataataacacaccaccgtacccaaatggtaatattaactttcctcccaccgcgcagcagaatataccgcccacggtttatccacaacaagtgccatttccaggtcaaccacaggggggtcaatttccacagccttcatcagaacagcaggtgtttaaccagcttccacaagtgactcaaacttttcacaactctgcgcagaatacgaatgcaactgggggccctggcagcgggtctatgccaatgtttacgccggtagcatcctttccccatcccatggctacagcagcaacggcagctgctccgttaccacggtctgcatcccaggcatctttatctatgttacgggtgccgtatcatgtaagaaaatacttatctaatttggcgatgttgaaattgtacgaaataataaatgaggtgaatacggcaatgggtaagattggcctgctttcattctggacagaattaatatcagatatttttacacctgatgcagttataaggtatagtaaaaagtctatgacagattatagagaattcgaatttatcatcccagtgttcccagttatttgctctacattaggcagatttggcatcgttagaatggaagttaaggttttacaattgaaaacacaagttctaagtaattctacgatttttttcaactgtcctcgtgtcacatttgtctattattatcctgatggttcatatattacacatttttcccaaatgaaaggtgctttcgatttggacttgaaaattaattggctggacgtatctatgcatagttttgtccctgatattgaatggaatgcagtggaacggcttttgagtgatgacacaaagtctacagaaattgaacaaatattccgtaaattgaaacaagaagatgtcaaagagcaagggaattcttttgcagaaaataatgctacgaatgttcctccgaattttgaggccatcactcagctgagatcatattttgacgtattcagaaacgtctctgtgtttggcactcaagaagggttgatgagagtcatgcaaataagtaccgttatgtctactttgaaaaaccttcgaaagtttcaaattgaaaagaacattgatagtcccgtgaccgccctaagtgcgtacattgacgccgacaagaaggacagtggaagcgagcccttgcacgcaaagaggcgacgcaacagcggtatctctcctcgcaccacgacgttggggccaaacggcaactccaatacaagcaatgaagagcttccaacaagtgatgtgaatgatattaacaaagacatgacaaaaaagaagatgaagttttaa

SEQ ID NO: 168 - protein, 458 aa, Saccharomyces cerevisiae
MYQGPPQPPPQAVPMPYIVNNNTPPYPNGNINFPPTAQQNIPPTVYPQQVPFPGQPQGGQFPQPSSEQQVFNQLPQVTQTFHNSAQNTNATGGPGSGSMPMFTPVASFPHPMATAATAAAPLPRSASQASLSMLRVPYHVRKYLSNLAMLKLYEIINEVNTAMGKIGLLSFWTELISDIFTPDAVIRYSKKSMTDYREFEFIIPVFPVICSTLGRFGIVRMEVKVLQLKTQVLSNSTIFFNCPRVTFVYYYPDGSYITHFSQMKGAFDLDLKINWLDVSMHSFVPDIEWNAVERLLSDDTKSTEIEQIFRKLKQEDVKEQGNSFAENNATNVPPNFEAITQLRSYFDVFRNVSVFGTQEGLMRVMQISTVMSTLKNLRKFQIEKNIDSPVTALSAYIDADKKDSGSEPLHAKRRRNSGISPRTTTLGPNGNSNTSNEELPTSDVNDINKDMTKKKMKF

SEQ ID NO: 169 - DNA, 1629 bp, Saccharomyces cerevisiae
atgtcgttactgagactgtggaacaaagaatcaagggcaccatcaaaaataaagagtcatggtattgttggcagttacggcaacagcatgctggcccataacaacgtgaagcaatttcgtatagacatagacgaaccgcatagagtatggaaaccgaatgaaagcataaccggagaagcggtcattgacataaagagagacataactaacgtagcgatcaaattatcgctagtatgtgaggttcgcgtgaaaacggggaacagtccaacctccaagaataagagaattgagaaaaccttagagaagtcgacgtttctttatggacaggactacgtaaagacagctttttcggctaaggaaaagaaaccgcatgttgacaaaaccaccattctcaatggtttaagcaagggggaacacaggtttccctttaggatacgaataccacgaggcagaggaatgttgagctctataaagttcgaaaggggctcgataacatacttcctctcttgcactttagaatccctcaacaacatcaacggattaaaaaaaccggaagcaagatgcgaacgtgagtttgcagtcatagttccgctggacgtctcgaggctgcccaagccgaaaactaagacagtggttttacaatcagcatctatggtccaaaacaaaaagaacaaatctacagaggacgaatcctcatcgtatacacaattaactcaaaagtctactacttctaattcttctagcagttcagtaaactccaagacgtcccccttaccaaataaaacggtgactatatccgtagacataccgcaggctggattcatgattggtgaaattatccctatagacgttaagattgaccactataagcctttctatgcccctgcgggtctcaccaccactttggtgaggatatgtagggtgggcggtgcaggcaaagatgatcctatggagactttcagaaaagatatatgtcagagtatctctcctatatatattaaccctgaaacgttgcagtttcaatctagagtttatctgaaagtgccccttgatgcattttcgacccttactactgtgggaaaatttttctccttccaatactatatcgaggttatggttaacttatcaaaaaaaaacgtggtttacacagaatctaatagaataataggaactcctattggagaacaaaatggcttgggcgtagagaataatatcaaccgtatccaaaggaaaatgctacgtatggtcaatccagaaacgttggagaacgattctgagggttatgaatccagtatatttttcaaagatatggtaaatgtggaaaagctaaagagactgaggaatgtaactggtatgtccatagaaaccgtcataggaacgacgagatccgaacagcagcaatctgatgcaagcatcccatcccaatcctcaatcacggctcctcaaaattctccatcgaatttaagagattggttggccccattaaatgcatatgatagtgacgatgttccagttccaaagtattcgccaaatgataaagtcagtgtaccgtcggaagacaaacaagaacttgaacaaaaaagactacaacagttagaaagcgatcctcccccttgtgatgactattaa

SEQ ID NO: 170 - protein, 542 aa, Saccharomyces cerevisiae
MSLLRLWNKESRAPSKIKSHGIVGSYGNSMLAHNNVKQFRIDIDEPHRVWKPNESITGEAVIDIKRDITNVAIKLSLVCEVRVKTGNSPTSKNKRIEKTLEKSTFLYGQDYVKTAFSAKEKKPHVDKTTILNGLSKGEHRFPFRIRIPRGRGMLSSIKFERGSITYFLSCTLESLNNINGLKKPEARCEREFAVIVPLDVSRLPKPKTKTVVLQSASMVQNKKNKSTEDESSSYTQLTQKSTTSNSSSSSVNSKTSPLPNKTVTISVDIPQAGFMIGEIIPIDVKIDHYKPFYAPAGLTTTLVRICRVGGAGKDDPMETFRKDICQSISPIYINPETLQFQSRVYLKVPLDAFSTLTTVGKFFSFQYYIEVMVNLSKKNVVYTESNRIIGTPIGEQNGLGVENNINRIQRKMLRMVNPETLENDSEGYESSIFFKDMVNVEKLKRLRNVTGMSIETVIGTTRSEQQQSDASIPSQSSITAPQNSPSNLRDWLAPLNAYDSDDVPVPKYSPNDKVSVPSEDKQELEQKRLQQLESDPPPCDDY

SEQ ID NO: 171 - DNA, 9279 bp, Saccharomyces cerevisiae
atgaatcaaagcgatccgcaagacaaaaaaaatttcccaatggaatactctttgaccaagcatcttttttttgataggcttctacttgttcttcccatagaatctaatttgaaaacatatgctgatgtggaggcagattcagttttcaattcgtgtcggtccatcattttgaatatagccatcactaaggacttgaacccgattatcgaaaacacattaggtttaattgacttgattgtgcaagatgaagaaattacgtctgacaatattacagatgatattgcccattctatattggttcttttgagattactgagtgatgtttttgagtattactgggatcaaaacaatgacttcaagaaaattagaaacgataattacaaaccgggattttcaagtcacaggccaaacttccatacatctaggccaaagcacacgagaatcaatccagctttggcgacgatgttactatgtaaaatttctaagctgaagttcaatacaagaactttaaaggttttacagaacatgtctcaccatctttctggcagcgctactatctcaaaatcgagtattttacccgattcacaggaatttttacaaaagagaaactatccagcatataccgagaaaatagatttaacaatagattatatccagagattcatatctgcttccaatcatgttgaattcacaaagtgtgtcaaaacaaaagttgttgcacctttattgatatcacacacctcaaccgaattgggcgtagtaaaccacttggatttatttggttgtgagtatttgactgataagaatctgctagcatatctggacatactacaacacctgtcaagttacatgaagaggaccatttttcattcgcttttgttatattatgcttccaaagcttttttattttggataatggcaaggccaaaagaatacgtcaaaatttataacaatctaatatcatcagattataatagtccgtcttcttcatctgataatggtggttcgaataattctgataaaacgtctatatcccaactagtctcactgttattcgatgacgtttattccacttttagtgtatcatcattattaacaaatgtcaataatgaccaccactaccatcttcatcattcatcttcttcatcaaagacgaccaacactaatagtccaaactctatatcaaaaacgtcgataaagcagtcgagtgtgaatgcttctggcaatgtttctccgtctcagttttctactgggaatgatgcatcgcctacttcccctatggcatcattgagttcacccttaaacacgaacatcctagggtatccgttatctccaatcacttcaacactaggacaggcgaatacttccacatcgactacggctgcaactaccaaaacagatgcagatacgccctctactatgaatactaacaacaataataacaataacaacagcgctaatcttaataatattccacaacgcatattttccttagatgacatttcatcctttaactcgagtagaaaatcactcaatctagatgatagtaactccttgtttctttgggatacttctcagcattctaatgcatcgatgacaaatacaaatatgcatgcaggagttaataattctcagtctcagaacgatcagtcttctttaaactatatggaaaatattatggagctgtattccaactataccggatcagaactatcctcccatactgccatattaaggtttttggtggttctgaccttattagacagtgaagtatatgatgagatgaactcaaattcgtatagaaaaatttcggaaccgataatgaatattaatccgaaggactctaatacttcaagttggggctcagcatccaaaaacccaagtatcaggcacctcacccatggcttaaaaaaacttactttacagcaaggcaggaaacgtaacgttaaatttttgacatatttgattagaaatttgaatgggggacagttcgtttcagatgtttccttgattgactctatcaggtccattctattcttaatgacaatgacgtcttctatatcccaaatcgattcaaatattgcttctgttattttttcgaagagattctacaacttgttgggtcaaaatttagaggtcggcaccaattggaattctgccactgcaaatacttttatttctcattgtgttgaaaggaatccccttacacataggcgtttacaattagagttttttgcaagcggtttacagctggattctgatttatttttaagacatttacaactggaaaaagaactcaatcacatagaccttcccaaaatatcgttatacactgaaggatttagggtattttttcacctagtaagcaccaaaaaacttcatgaggatattgcagaaaaaacctcctctgtgttaaagagacttttctgcataattgctgatattttgttgaaagcaacgccttattttgacgataatgtaaccaagattattgcttctatattggatgggcatattttagatcaatttgacgctgcgcgaacactttctaatgatgatcatgtcagttttgatgctgccacaagcgtttacactgagccaaccgaaattattcataactcatcggatgcctcgttagtctcttcactttcccaatcacccttatcaattaactcaggaagcaatatcaccaatacgcgcacctgggatattcaatcaatcttaccaaccttatcgaacagatcaagtgcttctgatttgagcttgtctaacattttgactaatccgttggaggcacaacaaaataataatgcaaacttgttagcccatagattatctggggttcctactactaagagatacgcttcaccgaacgactctgaaagatcacgacaaagtccatattcttctccgccgcaattgcaacaaagtgacttgccttctccgctctcagtcctctcgtcaagtgcaggattttcttctaatcattcgattacggcaaccccaactattttgaaaaacatcaaatctccaaaaccaaacaaaacaaaaaaaattgctgatgataaacaattgaaacagccttcttattcaagagtaatactgagtgacaatgatgaagcaagaaagattatgatgaacattttcagcattttcaaaagaatgaccaactggtttatacgcccagatgctaatacagaattcccgaagacttttacggatattataaaaccactttttgtctctatattggattctaatcaaagactacaagttacagcgcgggcttttattgaaatcccattaagttatatagctacttttgaagacattgataatgatcttgacccaagagtactgaatgaccattatttgttatgtacatatgccgttactttgtttgcttcatcattgtttgatttgaagttagaaaatgcgaagagagagatgctactagacattattgttaaatttcaacgagtccgttcttatttatcaaatttagcagaaaaacacaacctagtccaggcaataattacgacggagaggttgacgctgccattattagttggtgctgtaggaagtggaattttcatttcattatactgcagtcgtggaaatacgccacgcttaataaaaatttcatgttgtgaatttctacgatccttgagattttatcaaaaatacgtaggcgctttggatcaatattccatttacaatattgatttcatagatgctatggcccaggacaatttcactgcctcaggatcagtggctttgcaacggcgtctaagaaataatattttaacttatatcaaaggatccgactcaatccttttggattcaatggacgtgatttacaagaagtggttttacttcagctgttcgaaatcagttacgcaagaggaactagtagattttagaagcttggcaggcattctagcttctatgtcaggtattctgtctgatatgcaagagttggaaaaaagcaagagcgctccagataatgaaggagacagcttatcatttgagtcacgaaatcccgcttatgaggtgcacaaaagtcttaaactcgagttaacgaaaaaaatgaatttctttatttcaaaacaatgtcaatggttgaataatccaaatctattaacaagagaaaattcgagagatatattaagtattgagttgcatcctctatcttttaacttattgtttaacaacctaggactgaaaatagatgaactgatgtcaattgatctttcaaagtcacatgaggattcatcgtttgttttactagagcagataataattataataagaactatactaaagagggatgatgatgaaaagataatgctactcttttcgacggacttgcttgatgcggtcgataagttgatcgaaatagtggagaaaatttccatcaagtcctccaaatattataagggaattatccaaatgtcgaaaatgtttagagcatttgagcactctgaaaagaacctgggcatttcaaatcatttccatttaaagaataaatggttgaagttagttattggttggttcaaactatctattaataaggattatgattttgaaaacctgtcaagaccattaagggaaatggatttgcagaaaagggacgaagattttttgtatatcgacacttctattgaatctgcaaaagcattggcttacctaacacataatgttcctttagaaataccgccttcaagctcaaaagaagattggaacagatcttctacagtatcatttggcaatcactttactattttgttaaaaggtctggagaaaagcgcggacctgaatcagtttccagtttcattaaggcataagatcagtatacttaatgaaaatgtaataatagcgctaacgaacttatctaatgccaatgtcaacgtttctttaaaattcactttaccaatgggttattctccaaataaagatatcagaatcgcctttttaagagttttcatcgacatagtaaccaactatccagttaaccctgagaaacatgaaatggataaaatgctagctatagacgacttcctgaaatatataatcaagaacccaatattagcatttttcggaagtttagcgtgttctcctgctgatgttgatttatatgctggtggattcttaaacgcctttgacactagaaatgcgtctcatatccttgttactgagctccttaaacaagaaatcaaacgggccgcaagatcagacgatattctcagaagaaatagttgtgcaacaagggctttgtcactttacactagatctagaggtaacaaatatttgataaaaactttgagacccgttttgcaagggatagtggataacaaggagtcttttgaaattgataagatgaaaccaggatccgaaaactccgaaaagatgttagacttatttgagaagtacatgacaagattaattgacgcaattacaagttctattgatgatttcccaatagaattagttgatatctgtaaaacaatttacaatgctgctagtgtaaattttccagaatacgcatatattgccgttgggtcattcgttttcttgaggtttatcgggcctgctttagttagtcctgattcggaaaatatcattattgttacgcacgcccatgacagaaagccctttattacactagctaaagttattcaaagtttagctaatggcagggaaaatatattcaagaaagatatcttagtttcaaaagaagagtttttgaaaacctgtagtgataaaatattcaattttttgtctgaattgtgcaagataccgactaacaatttcaccgtcaatgtaagagaagatccgacaccaataagctttgactactcatttttgcataaattcttttacctcaatgagtttaccataagaaaagaaattattaatgaatccaaattaccaggggagttcagctttttgaaaaatactgttatgctcaacgacaaaattcttggtgtattgggacaacctagcatggaaataaaaaatgaaattcctccttttgtagtcgagaatcgggaaaaatatccttcattgtatgaattcatgagtcgctatgccttcaaaaaagtggacatgaaagaagaagaagaggataatgcgccatttgtacatgaagcaatgacattggatggcatacaaatcattgtcgtaacttttaccaattgcgagtacaataattttgtaatggactcactggtctataaagttctgcagatatatgcaagaatgtggtgctctaaacattatgtagttatcgattgtaccaccttttatgggggtaaggctaatttccaaaaattgactactctatttttcagtttgataccagagcaagcatcaagtaattgtatgggatgttattacttcaacgtcaacaaatcatttatggaccaatgggcctcatcatatactgtagaaaatccgtacttggtcactacaattccccgttgtttcatcaacagcaatactgaccaaagtttgataaagtccttaggattgagtggtaggagtttggaagttttgaaagatgtaagagttactttgcatgatattaccctttatgacaaggaaaaaaagaagttttgtcccgtgtccttgaagataggaaacaaatacttccaagttttacatgagattccgcagttgtacaaggttaccgtatcaaacaggacattcagcatcaaattcaacaatgtttacaagatatcaaatttaatttcagtcgatgtctctaacaccacaggcgtttcctcggaatttacgttaagtcttgataatgaagaaaagttggtattttgcagtccgaagtacctagaaattgtgaaaatgttttattatgcccagttaaagatggaagaagactttggtacggatttttcgaacgatatttcattttcaacatcctcttcagcagttaatgcttcttactgcaatgttaaagaagttggtgaaattatatcacatttgtcattggtgatccttgtaggtttattcaatgaggatgatctcgtcaaaaacatatcatacaaccttctcgtggcaacgcaagaagcatttaatttagattttgggacaaggcttcacaaatccccagagacatatgtacccgatgataccaccacgttcttggccctaattttcaaggctttttcagaatcttcaacggaactaactccatatatatggaaatatatgctggatggccttgaaaacgacgtgattcctcaagaacatattcctacggttgtctgttcattgtcatactgggtaccaaacttatatgaacatgtatatttggcaaatgacgaagagggaccagaggcgatttcacgtataatctatagcttaatcaggttgacggtcaaagagccaaatttcacgacagcttaccttcaacagatttggtttttactggcattggatggtcgtctcacgaacgtgatagttgaagaaatagtaagtcatgcgctggatagagattcagaaaacagagactggatgaaagctgtgtcaatactaaccagttttccaacgacagagattgcttgtcaggtaatagagaagctaataaatatgatcaaatcttttctaccttctctagcagttgaggcttccgcacacagttggtctgagcttactattttatcaaaaattagtgtgtcaattttctttgaatcacccttactttcccagatgtatttaccggagattcttttcgctgtgtctctgttaattgatgtcggtccttcggaaataagagtctcattgtacgagttgttgatgaatgtttgtcattctttaaccaacaatgagtccttacctgaaaggaataggaaaaatttggatatcgtctgtgcaacattcgcacgtcaaaagttgaactttatctccggttttagccaagaaaaaggtagagttttaccaaattttgccgcttcctccttctccagtaaattcggaacattagatctcttcactaaaaacattatgctattgatggaatatggttctatttcagagggtgcacaatgggaggcaaaatataagaaatatttgatggatgcgatttttggccatcggtcgttcttctctgcgagagctatgatgattctaggtataatgagtaagtcgcacacgtcccttttcctttgtaaagaacttttagttgaaaccatgaaggtcttcgcagagccagttgtggatgatgaacaaatgttcatcattatagctcatgtctttacttacagcaaaattgtcgaagggttagatccttcttcagaattaatgaaagagctattttggcttgctacaatatgtgttgaatcccctcatcctttactctttgaaggtggtctcctgttcatggtaaattgtttgaagcgactgtacacggtccatcttcaacttggattcgatggcaaatcgctagccaaaaaattaatggaatctagaaattttgctgctacgcttttggctaagttagagtcatacaatggatgcatatggaacgaagataattttcctcatattattttaggtttcattgcaaacggtttatccattcctgtcgtaaaaggagccgcattagattgtctacaggcccttttcaagaatacatattacgaaagaaagtccaacccaaaatcctccgattatctttgttaccttttcttactccatttggtcttaagtcctgaacaactttctaccttgttacttgaagtcggcttcgaagatgaactggtacctttaaataatacactaaaagtgccacttactttgatcaactggctaagttcagactcagataaatctaatatagtcttataccaaggagcacttttgtttagctgtgttatgtcagacgaaccatgtaaattccgttttgctctattgatgaggtatttgctcaaagtcaaccctatttgtgtattcaggttctatacgctgactagaaaggaattcaggaggttatcaaccctagaacaatcatctgaagcggttgctgtctcttttgaattgattgggatgcttgttacacacagtgagtttaattacctagaggaatttaatgatgaaatggtcgaacttttaaaaaagagaggcttgtcagttgtgaagcctctggatatttttgatcaggaacatatagaaaagttaaaaggagagggtgaacatcaagtggcaatttatgagagaaaaagattagcaacaatgatactggcaagaatgtcgtgctcctaa

SEQ ID NO: 172 - protein, 3092 aa, Saccharomyces cerevisiae
MNQSDPQDKKNFPMEYSLTKHLFFDRLLLVLPIESNLKTYADVEADSVFNSCRSIILNIAITKDLNPIIENTLGLIDLIVQDEEITSDNITDDIAHSILVLLRLLSDVFEYYWDQNNDFKKIRNDNYKPGFSSHRPNFHTSRPKHTRINPALATMLLCKISKLKFNTRTLKVLQNMSHHLSGSATISKSSILPDSQEFLQKRNYPAYTEKIDLTIDYIQRFISASNHVEFTKCVKTKVVAPLLISHTSTELGVVNHLDLFGCEYLTDKNLLAYLDILQHLSSYMKRTIFHSLLLYYASKAFLFWIMARPKEYVKIYNNLISSDYNSPSSSSDNGGSNNSDKTSISQLVSLLFDDVYSTFSVSSLLTNVNNDHHYHLHHSSSSSKTTNTNSPNSISKTSIKQSSVNASGNVSPSQFSTGNDASPTSPMASLSSPLNTNILGYPLSPITSTLGQANTSTSTTAATTKTDADTPSTMNTNNNNNNNNSANLNNIPQRIFSLDDISSFNSSRKSLNLDDSNSLFLWDTSQHSNASMTNTNMHAGVNNSQSQNDQSSLNYMENIMELYSNYTGSELSSHTAILRFLVVLTLLDSEVYDEMNSNSYRKISEPIMNINPKDSNTSSWGSASKNPSIRHLTHGLKKLTLQQGRKRNVKFLTYLIRNLNGGQFVSDVSLIDSIRSILFLMTMTSSISQIDSNIASVIFSKRFYNLLGQNLEVGTNWNSATANTFISHCVERNPLTHRRLQLEFFASGLQLDSDLFLRHLQLEKELNHIDLPKISLYTEGFRVFFHLVSTKKLHEDIAEKTSSVLKRLFCIIADILLKATPYFDDNVTKIIASILDGHILDQFDAARTLSNDDHVSFDAATSVYTEPTEIIHNSSDASLVSSLSQSPLSINSGSNITNTRTWDIQSILPTLSNRSSASDLSLSNILTNPLEAQQNNNANLLAHRLSGVPTTKRYASPNDSERSRQSPYSSPPQLQQSDLPSPLSVLSSSAGFSSNHSITATPTILKNIKSPKPNKTKKIADDKQLKQPSYSRVILSDNDEARKIMMNIFSIFKRMTNWFIRPDANTEFPKTFTDIIKPLFVSILDSNQRLQVTARAFIEIPLSYIATFEDIDNDLDPRVLNDHYLLCTYAVTLFASSLFDLKLENAKREMLLDIIVKFQRVRSYLSNLAEKHNLVQAIITTERLTLPLLVGAVGSGIFISLYCSRGNTPRLIKISCCEFLRSLRFYQKYVGALDQYSIYNIDFIDAMAQDNFTASGSVALQRRLRNNILTYIKGSDSILLDSMDVIYKKWFYFSCSKSVTQEELVDFRSLAGILASMSGILSDMQELEKSKSAPDNEGDSLSFESRNPAYEVHKSLKLELTKKMNFFISKQCQWLNNPNLLTRENSRDILSIELHPLSFNLLFNNLGLKIDELMSIDLSKSHEDSSFVLLEQIIIIIRTILKRDDDEKIMLLFSTDLLDAVDKLIEIVEKISIKSSKYYKGIIQMSKMFRAFEHSEKNLGISNHFHLKNKWLKLVIGWFKLSINKDYDFENLSRPLREMDLQKRDEDFLYIDTSIESAKALAYLTHNVPLEIPPSSSKEDWNRSSTVSFGNHFTILLKGLEKSADLNQFPVSLRHKISILNENVIIALTNLSNANVNVSLKFTLPMGYSPNKDIRIAFLRVFIDIVTNYPVNPEKHEMDKMLAIDDFLKYIIKNPILAFFGSLACSPADVDLYAGGFLNAFDTRNASHILVTELLKQEIKRAARSDDILRRNSCATRALSLYTRSRGNKYLIKTLRPVLQGIVDNKESFEIDKMKPGSENSEKMLDLFEKYMTRLIDAITSSIDDFPIELVDICKTIYNAASVNFPEYAYIAVGSFVFLRFIGPALVSPDSENIIIVTHAHDRKPFITLAKVIQSLANGRENIFKKDILVSKEEFLKTCSDKIFNFLSELCKIPTNNFTVNVREDPTPISFDYSFLHKFFYLNEFTIRKEIINESKLPGEFSFLKNTVMLNDKILGVLGQPSMEIKNEIPPFVVENREKYPSLYEFMSRYAFKKVDMKEEEEDNAPFVHEAMTLDGIQIIVVTFTNCEYNNFVMDSLVYKVLQIYARMWCSKHYVVIDCTTFYGGKANFQKLTTLFFSLIPEQASSNCMGCYYFNVNKSFMDQWASSYTVENPYLVTTIPRCFINSNTDQSLIKSLGLSGRSLEVLKDVRVTLHDITLYDKEKKKFCPVSLKIGNKYFQVLHEIPQLYKVTVSNRTFSIKFNNVYKISNLISVDVSNTTGVSSEFTLSLDNEEKLVFCSPKYLEIVKMFYYAQLKMEEDFGTDFSNDISFSTSSSAVNASYCNVKEVGEIISHLSLVILVGLFNEDDLVKNISYNLLVATQEAFNLDFGTRLHKSPETYVPDDTTTFLALIFKAFSESSTELTPYIWKYMLDGLENDVIPQEHIPTVVCSLSYWVPNLYEHVYLANDEEGPEAISRIIYSLIRLTVKEPNFTTAYLQQIWFLLALDGRLTNVIVEEIVSHALDRDSENRDWMKAVSILTSFPTTEIACQVIEKLINMIKSFLPSLAVEASAHSWSELTILSKISVSIFFESPLLSQMYLPEILFAVSLLIDVGPSEIRVSLYELLMNVCHSLTNNESLPERNRKNLDIVCATFARQKLNFISGFSQEKGRVLPNFAASSFSSKFGTLDLFTKNIMLLMEYGSISEGAQWEAKYKKYLMDAIFGHRSFFSARAMMILGIMSKSHTSLFLCKELLVETMKVFAEPVVDDEQMFIIIAHVFTYSKIVEGLDPSSELMKELFWLATICVESPHPLLFEGGLLFMVNCLKRLYTVHLQLGFDGKSLAKKLMESRNFAATLLAKLESYNGCIWNEDNFPHIILGFIANGLSIPVVKGAALDCLQALFKNTYYERKSNPKSSDYLCYLFLLHLVLSPEQLSTLLLEVGFEDELVPLNNTLKVPLTLINWLSSDSDKSNIVLYQGALLFSCVMSDEPCKFRFALLMRYLLKVNPICVFRFYTLTRKEFRRLSTLEQSSEAVAVSFELIGMLVTHSEFNYLEEFNDEMVELLKKRGLSVVKPLDIFDQEHIEKLKGEGEHQVAIYERKRLATMILARMSCS

SEQ ID NO: 173 - DNA, 1332 bp, Saccharomyces cerevisiae
atgaacagtacacctcctacgtcacccgtcaccagggtttctgatggttcctttccatccataagtaacaatagtaagggttttgcttatcgccaaccgcaaaaacataaaagtaacttcgcatattcacatctggtatctcctgtagaggagccgacagctaaattcagtgaggcattccagacagattattctagtaaggcgcccgttgctacctcggaggcgcacctaaagaacgatttagacgtattgttcactaccccccggttttactctccggagaatttggctttaatgttccgtctttctaatacagtttcttccctagaatttctggatgagtttttgatgggcatattacttgctccagagatggattttttgtcaaatccaagttattctcttccgtctaacaaattagtgggacagggaagttattcatatgtgtaccctatatcatcaagtgcttcatcaagatgtaacaacgattcaggggttgttttaaagtttgccaaatcacagcataaaagcaaggtgattttacaggaagctttgacgctagcatatctccagtacatgagtccttcaaccaatgaaagtcatattattccattctatgggttgacatacataactaaatcccattttagaagactgaggtccaacgaatgtgttcctggccttattcttccgaaatgcgaaatgagtttatatcacttcaatacagcagtgtcacataagctttcgttgataacaaaaagaaaaatatggtggagacttatgaagcaaatgatagacgcattaaaatctttgaaaacaaatggtataattcatggtgatataaaaacagcaaatattttaataacagaaatgcatgttcttaatggaggccattgtaaggattttgacttctaccttgctgactttacgtcggcatttcacattaatcaaacaccaacagatctgaataccacggtagaatactgtgcaccagaactaattgatagctcctccgatcatgttcctacatttgaatcggatttgtatgccgtggggctttgtcttttatcatttatatcgcagcatgagccttacaacgaacttcaggcgttagtgtcgcatggatcctctccaggtattggcagttcatctatacagcagtcccaatggctgataaatgctcttttgaaaaaagatcctataaatctaaacatgttaagaaacgatttattccaggattggaagtcagaactagcattattgtccagaattctggttgatagacttcctctagaaaatctcataactatactcgatagtaactatatatga

SEQ ID NO: 174 - protein, 443 aa, Saccharomyces cerevisiae
MNSTPPTSPVTRVSDGSFPSISNNSKGFAYRQPQKHKSNFAYSHLVSPVEEPTAKFSEAFQTDYSSKAPVATSEAHLKNDLDVLFTTPRFYSPENLALMFRLSNTVSSLEFLDEFLMGILLAPEMDFLSNPSYSLPSNKLVGQGSYSYVYPISSSASSRCNNDSGVVLKFAKSQHKSKVILQEALTLAYLQYMSPSTNESHIIPFYGLTYITKSHFRRLRSNECVPGLILPKCEMSLYHFNTAVSHKLSLITKRKIWWRLMKQMIDALKSLKTNGIIHGDIKTANILITEMHVLNGGHCKDFDFYLADFTSAFHINQTPTDLNTTVEYCAPELIDSSSDHVPTFESDLYAVGLCLLSFISQHEPYNELQALVSHGSSPGIGSSSIQQSQWLINALLKKDPINLNMLRNDLFQDWKSELALLSRILVDRLPLENLITILDSNYI

SEQ ID NO: 175 - DNA, 2163 bp, Saccharomyces cerevisiae
atgcctttgagaaatctaactgaaacgcacaactttagtagcacaaacctggacacagatggtacaggcgacgatcatgatggtgctcctctttcctcatctccttcttttggacaacaaaatgacaatagcaccaacgataatgctggtctcacaaacccttttatggggagtgacgaagaatctaatgcgcgggatggagaatctctgtcttcttctgttcattatcagccacaggggagtgactcttcactacttcatgacaattctcgtctagatctaagtcaaaataaaggtgtatctgattacaaaggttactattccaggaacaatagtagagctgtgagtacggctaatgataactcatttcttcagccaccacatagagctatagcctcttctccttctttgaattctaatttatcgaagaatgatattctctcaccgccagaatttgatagatatcccttagtgggttccagagtcacttctatgactcaactgaaccatcatggtcgctcgccaacatcatctccaggaaacgagtcgtccgcctcattctcttctaatccgtttttgggcgagcaagatttttctccatttggtgggtatcctgcttcatcgttcccacttatgatagatgaaaaggaagaagatgattatttacacaatcctgaccccgaagaagaggcaagactggatagaaggaggttcatagatgacttcaagtacatggataaaaggtctgctagtgggctagctggtgtattgctcttgtttctggcagccatctttatttttattgttttgccagcgttgacctttaccggtgctattgatcacgaaagcaacactgaagaagttacatatttaactcaataccaatatcctcaactatccgccattagaacatctctggttgacccagacacacctgatacagcgaagacaagagaagctatggatggctctaagtgggaattagtattttctgatgagtttaatgcagaaggcagaacattttatgatggggatgatccatactggacagcccctgatgttcactatgatgctactaaggatttagaatggtacagtccagacgcttccacaactgtgaacggaaccttgcagctgagaatggatgcctttaagaaccatggcttatattacagatcaggtatgttgcagagttggaataaggtttgtttcacgcagggtgctctagaaatctctgcaaatctaccaaattatggccgtgtttcaggtttgtggcccggtctttggactatgggtaatttagggaggcccggttatttggctagtacccaaggtgtctggccttattcttatgaatcgtgtgatgctggtattacacccaaccaaagttccccggatggtatttcttacttgccgggacaaaagttaagtatttgtacttgtgatggtgaagatcatccgaatcaaggtgttggtagaggagctccagaaattgatgttttggaaggtgaaactgatactaagattggtgtaggtatagcctctcaatccttgcaaattgcaccttttgatatctggtacatgcctgactatgattttatcgaggtttacaatttcacaacaacgaccatgaacacttatgctggcggtccatttcaacaagccgtatctgctgtctcaactttgaacgtaacttggtatgaattcggtgagtacggtggctactttcaaaaatatgccattgagtatctgaacgatgacgacaatggttatatccgttggtttgttggtgatactccaacttatactattcatgctaaagccttacatcctgatggtaatattggttggagaagaatcagtaaagaaccaatgtcgattattctaaatctgggtatttccaacaattgggcttatattgattggcagtatattttcttcccagtggttatgtcgattgactatgttagaatataccaaccaagtaatgctatatccgtgacatgcgatccaagtgactatccaacatatgattatattcaatcgcacttaaatgcattccagaatgcaaacttaactacttgggaagatgctggttacacgttccctaagaatatcctaactggtaaatgtactagctcgaagttcaagttatcctcttaa

SEQ ID NO: 176 - protein, 720 aa, Saccharomyces cerevisiae
MPLRNLTETHNFSSTNLDTDGTGDDHDGAPLSSSPSFGQQNDNSTNDNAGLTNPFMGSDEESNARDGESLSSSVHYQPQGSDSSLLHDNSRLDLSQNKGVSDYKGYYSRNNSRAVSTANDNSFLQPPHRAIASSPSLNSNLSKNDILSPPEFDRYPLVGSRVTSMTQLNHHGRSPTSSPGNESSASFSSNPFLGEQDFSPFGGYPASSFPLMIDEKEEDDYLHNPDPEEEARLDRRRFIDDFKYMDKRSASGLAGVLLLFLAAIFIFIVLPALTFTGAIDHESNTEEVTYLTQYQYPQLSAIRTSLVDPDTPDTAKTREAMDGSKWELVFSDEFNAEGRTFYDGDDPYWTAPDVHYDATKDLEWYSPDASTTVNGTLQLRMDAFKNHGLYYRSGMLQSWNKVCFTQGALEISANLPNYGRVSGLWPGLWTMGNLGRPGYLASTQGVWPYSYESCDAGITPNQSSPDGISYLPGQKLSICTCDGEDHPNQGVGRGAPEIDVLEGETDTKIGVGIASQSLQIAPFDIWYMPDYDFIEVYNFTTTTMNTYAGGPFQQAVSAVSTLNVTWYEFGEYGGYFQKYAIEYLNDDDNGYIRWFVGDTPTYTIHAKALHPDGNIGWRRISKEPMSIILNLGISNNWAYIDWQYIFFPVVMSIDYVRIYQPSNAISVTCDPSDYPTYDYIQSHLNAFQNANLTTWEDAGYTFPKNILTGKCTSSKFKLSS

SEQ ID NO: 177 - DNA, 1107 bp, Saccharomyces cerevisiae
atggctagaaccataacttttgatatcccttcccaatataaactcgtagatttaataggtgagggagcgtacggaacagtatgttcagcaattcataagccttccggcataaaggtagctatcaagaaaatacaaccgtttagcaaaaaattgtttgttacaagaactatacgtgagatcaagcttttacggtatttccatgaacacgaaaacataataagtatattggataaagtaaggccagtatccatagacaaactaaacgctgtttatttagtcgaagagttgatggaaaccgatttacaaaaagtaattaataatcagaatagcgggttttccactttaagtgatgaccatgttcaatactttacataccaaatcctcagagccttaaagtctattcacagtgcacaagttatccatagagacataaagccatcaaacctgttactaaattccaattgtgatctcaaagtctgcgattttggactagcgaggtgtttagctagcagtagcgattcaagagaaacattggtaggattcatgacggagtacgtcgcaacgcgatggtacagggcacccgagataatgctaacttttcaagagtacacaactgcgatggatatatggtcatgcggatgcattttggctgaaatggtctccgggaagcctttgttcccaggcagagactatcatcatcaattatggctaattctagaagtcttgggaactccatctttcgaagactttaatcagatcaaatccaagagggctaaagagtatatagcaaacttacctatgaggccacccttgccatgggagaccgtctggtcaaagaccgatctgaatccagatatgatagatttactagacaaaatgcttcaattcaatcctgacaaaagaataagcgcagcagaagctttaagacacccttacctggcaatgtaccatgacccaagtgatgagccggaatatcctccacttaatttggatgatgaattttggaaactggataacaagataatgcgtccggaagaggaggaagaagtgcccatagaaatgctcaaagacatgctttacgatgaactaatgaagaccatggaatag

SEQ ID NO: 178 - protein, 368 aa, Saccharomyces cerevisiae
MARTITFDIPSQYKLVDLIGEGAYGTVCSAIHKPSGIKVAIKKIQPFSKKLFVTRTIREIKLLRYFHEHENIISILDKVRPVSIDKLNAVYLVEELMETDLQKVINNQNSGFSTLSDDHVQYFTYQILRALKSIHSAQVIHRDIKPSNLLLNSNCDLKVCDFGLARCLASSSDSRETLVGFMTEYVATRWYRAPEIMLTFQEYTTAMDIWSCGCILAEMVSGKPLFPGRDYHHQLWLILEVLGTPSFEDFNQIKSKRAKEYIANLPMRPPLPWETVWSKTDLNPDMIDLLDKMLQFNPDKRISAAEALRHPYLAMYHDPSDEPEYPPLNLDDEFWKLDNKIMRPEEEEEVPIEMLKDMLYDELMKTME

SEQ ID NO: 179 - DNA, 2661 bp, Saccharomyces cerevisiae
atggaaggaagatcagattttgtggcgacttcacagtccggaagtgaaatgagccatagtgaaactaggaatagaactgggatgaatgctaggaaaaggaaattcgcctgtgtggaatgtcgtcagcagaagtcgaaatgtgatgctcacgaaagagcaccggagccatgcactaagtgtgctaaaaagaatgtcccatgcattttaaaacgagatttcagaagaacttataaaagagcaaggaacgaagccattgaaaaaagattcaaggaactcaccagaactttgacaaatttaacttcggatgaaattttgaagaaaattgaagaggaacaggaaattgttttggataacagtaatttcacaaaagaaaaagtaaaacaactcaggaagagtgcttttgagacgacagaaatagaaccgagatcatacaaaacacttcgaggagaacctatttcttacagtaccaacagaagacatacggattcttctcctttaacgctcttaagctcgtcgacaaacttcgaccctgttcactcaacaaacgttatgacagatgatcaacttaagtgcttgccaaaaagcctgggcgacgtatatttgtcaagcagcgatattgctgagctgtttcaagaatttgcgacaaaatatcatcaatttttacccgtcgttgacctttcgaaaggagcagagcgaatttatcacttatctccttgcttattctgggtcatcctgctcattggtttaaggcggaaatttggggctacagacttaatgactcgattatcagtgctagtaaagtcagttttatcagaaatcacaatatctccaataattcgatatactccatcagataaggacgaacccgttctaaatgtagcatctgtatattccgtgcaagcatttcttttatacacgttctggcctcccttaacctcttcattaagcgccgacacttcgtggaataccataggaacagcgatgttccaagcgcttcgggtaggactaaattgtgcaggtttttcaaaagagtatgcttcggcaaattcagaattagttaacgagcaaatacgaacttggatttgctgcaatgttgtatctcaaacagttgcatcatcatttggtttcccagcttatgtttcatttgattatttagtaatcagctctattagagtaccaaattcaaaaagccaagtagatatacccaatgaactaagacaaatggctcaaattgctagatttgagaaccaaatcgtaaacacaatgaactccaccccggcgagtgttactgggatggtaagtcaggaagagaagcagcccttgttacacgttcttaatcaacaactaagtcaattggagattagtcttgaagaaaataacctagatgatatccgaaaatttttattactagtggccaaggttcacttattaacctattacttcactgatgttacctcccaaagtgctggaaaatcaaatggtaatatttatgagggatcatattccattatggaactcgatacaagttttgaaacgaaacgtggattggtgaaagtttataatgccgccgtaaactttcttatacatgccaatagtatgtgggaacatgatcctaccattattaagtactttcctggtttgtttgtcttgaatatatggcaatctgcctgtattattagtaaactcatacattcatcacttcattcaatgctagatgttaactcaggcaaaaaagcttataacaacgcaatttcattgacgtttaatgcctcagttttaaaatatgatatggcgtacagatcatccggaataatgcgaagcatatggagtttatttgctaatatgtatgatgcctggaaaaacgaccaaaaggaaggtggaggtagactaaataatgatttcaatttaggcatcaccataaaatctaggatgtcagtaaacgttttttttgactgcttatatattctaaaagagaaatgtggtatggccaaattggagagagagaccaaggtttctacagcttacaatgttgatgaagaggaagaggaagatgaagatgaggagggagaagaagaagaagaagaagaagaactaagtagtaaagttccagaaaatatggatagccagcaactaaggacaaggaaattcaccaatgtaaggcatccagaaaagaaagcaagaaaaataattgaaacaattccgctagacccaaatccaataaatgcaggctctaccagcagtggaagctcattaacgaccccaaatagtcaagtagcgaacactatatcatatagaggaatcctcaataaaatgtcacctagggaacaactgaatcatgcaaatttagattccagtgtttctacagacatcaaggacactgaagctgtcaatgaacctctgccaatagggaggaatgctgaacatccggcaaatcaaccgcctctttcaataacacaaatgcaagaaaacacactacctgcgacacaagccaactcttctctattagaaacgtatcccattgttcaatcaaaccccgttacaactacaatcaaagaatcacccaattccatcatggcaggttgggataactgggaatctgatatggtttggagggatgttgatattttaatgaatgaatttgcgttcaatcccaaggtttaa

SEQ ID NO: 180 - protein, 886 aa, Saccharomyces cerevisiae
MEGRSDFVATSQSGSEMSHSETRNRTGMNARKRKFACVECRQQKSKCDAHERAPEPCTKCAKKNVPCILKRDFRRTYKRARNEAIEKRFKELTRTLTNLTSDEILKKIEEEQEIVLDNSNFTKEKVKQLRKSAFETTEIEPRSYKTLRGEPISYSTNRRHTDSSPLTLLSSSTNFDPVHSTNVMTDDQLKCLPKSLGDVYLSSSDIAELFQEFATKYHQFLPVVDLSKGAERIYHLSPCLFWVILLIGLRRKFGATDLMTRLSVLVKSVLSEITISPIIRYTPSDKDEPVLNVASVYSVQAFLLYTFWPPLTSSLSADTSWNTIGTAMFQALRVGLNCAGFSKEYASANSELVNEQIRTWICCNVVSQTVASSFGFPAYVSFDYLVISSIRVPNSKSQVDIPNELRQMAQIARFENQIVNTMNSTPASVTGMVSQEEKQPLLHVLNQQLSQLEISLEENNLDDIRKFLLLVAKVHLLTYYFTDVTSQSAGKSNGNIYEGSYSIMELDTSFETKRGLVKVYNAAVNFLIHANSMWEHDPTIIKYFPGLFVLNIWQSACIISKLIHSSLHSMLDVNSGKKAYNNAISLTFNASVLKYDMAYRSSGIMRSIWSLFANMYDAWKNDQKEGGGRLNNDFNLGITIKSRMSVNVFFDCLYILKEKCGMAKLERETKVSTAYNVDEEEEEDEDEEGEEEEEEEELSSKVPENMDSQQLRTRKFTNVRHPEKKARKIIETIPLDPNPINAGSTSSGSSLTTPNSQVANTISYRGILNKMSPREQLNHANLDSSVSTDIKDTEAVNEPLPIGRNAEHPANQPPLSITQMQENTLPATQANSSLLETYPIVQSNPVTTTIKESPNSIMAGWDNWESDMVWRDVDILMNEFAFNPKV

SEQ ID NO: 181 - DNA, 1410 bp, Aspergillus terreus
atggctgcagatcaaggtatattcacgaactcggtcactctctcgccagtggagggttcacgcaccggtggaacattaccccgccgtgcattccgacgctcttgtgatcggtgtcatgcacaaaagatcaaatgtactggaaataaggaggttactggccgtgctccctgtcagcgttgccagcaggctggacttcgatgcgtctacagtgagcgatgccccaagcgcaagctacgccaatccagggcagcggatctcgtctctgctgacccagatccctgcttgcacatgtcctcgcctccagtgccctcacagagcttgccgctagacgtatccgagtcgcattcctcaaatacctcccggcaatttcttgatccaccggacagctacgactggtcgtggacctcgattggcactgacgaggctattgacactgactgctgggggctgtcccaatgtgatggaggcttcagctgtcagttagagccaacgctgccggatctaccttcgcccttcgagtctacggttgaaaaagctccgttgccaccggtatcgagcgacattgctcgtgcggccagtgcgcaacgagagcttttcgatgacctgtcggcggtgtcgcaggaactggaagagatccttctggccgtgacggtagaatggccgaagcaggaaatctggacccatcccatcggaatgtttttcaatgcgtcacgacggcttcttactgtcctgcgccaacaagcgcaggccgactgccatcaaggcacactagacgaatgtttacggaccaagaacctctttacggcagtacactgttacatattgaatgtgcggattttgaccgccatatcggagttgctcctgtcgcaaattaggcggacccagaacagccatatgagcccactggaagggagtcgatcccagtcgccgagcagagacgacaccagcagcagcagcggccacagcagtgttgacaccatacccttctttagcgagaacctccctattggtgagctgttctcctatgttgaccccctgacacacgccctattctcggcttgcactacgttacatgttggggtacaattgctgcgtgagaatgagattactctgggagtacactccgcccagggcattgcagcttccatcagcatgagcggggaaccaggcgaggatatagccaggacaggggcgaccaattccgcaagatgcgaggagcagccgaccactccagcggctcgggttttgttcatgttcttgagtgatgaaggggctttccaggaggcaaagtctgctggttcccgaggtcgaaccatcgcagcactgcgacgatgctatgaggatatcttttccctcgcccgcaaacacaaacatggcatgctcagagacctcaacaatattcctccatga

SEQ ID NO: 182 - protein, 469 aa, Aspergillus terreus
MAADQGIFTNSVTLSPVEGSRTGGTLPRRAFRRSCDRCHAQKIKCTGNKEVTGRAPCQRCQQAGLRCVYSERCPKRKLRQSRAADLVSADPDPCLHMSSPPVPSQSLPLDVSESHSSNTSRQFLDPPDSYDWSWTSIGTDEAIDTDCWGLSQCDGGFSCQLEPTLPDLPSPFESTVEKAPLPPVSSDIARAASAQRELFDDLSAVSQELEEILLAVTVEWPKQEIWTHPIGMFFNASRRLLTVLRQQAQADCHQGTLDECLRTKNLFTAVHCYILNVRILTAISELLLSQIRRTQNSHMSPLEGSRSQSPSRDDTSSSSGHSSVDTIPFFSENLPIGELFSYVDPLTHALFSACTTLHVGVQLLRENEITLGVHSAQGIAASISMSGEPGEDIARTGATNSARCEEQPTTPAARVLFMFLSDEGAFQEAKSAGSRGRTIAALRRCYEDIFSLARKHKHGMLRDLNNIPP

SEQ ID NO: 183 - DNA, 2373 bp, Saccharomyces cerevisiae
atgttcgaatctgtcaatttggatgaaaattctccagaggatagagaactggctaaggttttgtccccaccgggtagttatctttctccagcttcactagacagtggttcatcgttcacaaatagtgggacttcaactagttgctttgaaccaaaaaacaatctaccctccttatcgtttttaaatgctagagcgggatctttaggtggcatttttaatcataaacagatgacctcgccgtcaaattcgaatataggaggcgaaaatgtagaatcgaccacaagtagtaatgacggcagtaatgaaaatgcaggtcatcccactacttcagagcaagatcaaaatgcagatcaccccactatttcacaggcagatgataatggacactcatcgttgacccctaatcctgctgtaacttcaactgttacggataagaagggaaatacagtaaaacggaagtactccagaaatgggtgctccgagtgtaagagacgaagaatgaaatgtgatgaaactaaaccgacttgttggcagtgcgcaagattgaatcgtcagtgcgtttacgttttaaacccaaaaaataagaaaagaagaacctcaaatgctcaaagagtaaaagaatttaggaagcacagtactagcctcgataatgatcataataatgctcgcaagcgtcagcattcgtcatgcaaggctgagaagaagaaaaaagtacgacaaaatttaagtgaagacaccacggaccctaaaccgattacagataacggcaagaatgtacctttggatgaaatagaatccctagagattccaaatttggaccttaccaccacaatgaatggatatgacgttaatttactaatgcagaacttgaatgatatggttaatatgaaacttcatgactcttacttattgaatgaagaactgaaaggattagatttgcccgatttggacatacctgaacttttgcccgcttcgaatgtgaacagtagcgtaccaatatcctttctggtgaataatgtaataactttcaacacaaaactaagctcgttcaaactaggtggaatccacgataagtatctaaagatattttactacgattgcttagattctattgcgccctttttccaaaatcaagggaacccgttaagagatatcttactttcatttgcgaaaaacgaggcctatcttttatcttccatattagctacgggagcatctatagcatatagaaagtctaataacttggaagatgaacgaaactattgtgcttatttgtcacattgcctgagcctgttgggtgaacaattcaagaatgagtcaaacgttttaaataggatagagcctatcatcctgacggtcatcatgcttgcatgggattgtatttattcaatgaattctcaatggaggtctcacttaaaaggtgtaactgacctttttaaaaaaatcaatgccgggaattcctccaaagtacttaacgttgcaaaatgttggtttaaagttatggaaacattcgccagtataagtacggtatttggcggatctttaattgataataatgaccttgatgcaatttttgatccatatgattaccaatatgttgactcgttaaaatttttaaatattatgactccactaaatgagtttaatcttttaagaggacataaagaagatttcgatcttgttattaaagaagttttcaaatcactcaatacaattaggtcaactgaaaaaaattacttttctaaagaagaaggtttgttcactaagaaattagactatctgcttttatcatcccaaacttcgtccgaaaagtccaaagaccagatatcatatttcaatacgcagaaaattctagtggaaattgacaagcaattagattacgaatttattgacaaatctggaattataccctcagacaatcagtcacaccctagaattagtaatattcatgataatgccatcgatatggtgacattaaagaacggtgaagaagttgccatcagctggtatgatatttctcatcagacacaagttttatctttcttattaattgtattattaaaacttttaggtatgccaaaagagtcaagtaccattcaacaagtggtcaagaaaatcatgtctttcttcaaattcttagacagtgactcgccgccacaaaattcaaggacttgttatagtaattttgctgtattgattgcaggtttgaatgcaatggacgaggaaacaagagcgattgttaaaagatattataaaatcaatggtggaaaatttcaaaagctcacagaacataatcttaacagactggaaaaggtctggtatggtaaaaatcaaaattacaggttagaagaacaagacgttttaacatggtag

SEQ ID NO: 184 - protein, 790 aa, Saccharomyces cerevisiae
MFESVNLDENSPEDRELAKVLSPPGSYLSPASLDSGSSFTNSGTSTSCFEPKNNLPSLSFLNARAGSLGGIFNHKQMTSPSNSNIGGENVESTTSSNDGSNENAGHPTTSEQDQNADHPTISQADDNGHSSLTPNPAVTSTVTDKKGNTVKRKYSRNGCSECKRRRMKCDETKPTCWQCARLNRQCVYVLNPKNKKRRTSNAQRVKEFRKHSTSLDNDHNNARKRQHSSCKAEKKKKVRQNLSEDTTDPKPITDNGKNVPLDEIESLEIPNLDLTTTMNGYDVNLLMQNLNDMVNMKLHDSYLLNEELKGLDLPDLDIPELLPASNVNSSVPISFLVNNVITFNTKLSSFKLGGIHDKYLKIFYYDCLDSIAPFFQNQGNPLRDILLSFAKNEAYLLSSILATGASIAYRKSNNLEDERNYCAYLSHCLSLLGEQFKNESNVLNRIEPIILTVIMLAWDCIYSMNSQWRSHLKGVTDLFKKINAGNSSKVLNVAKCWFKVMETFASISTVFGGSLIDNNDLDAIFDPYDYQYVDSLKFLNIMTPLNEFNLLRGHKEDFDLVIKEVFKSLNTIRSTEKNYFSKEEGLFTKKLDYLLLSSQTSSEKSKDQISYFNTQKILVEIDKQLDYEFIDKSGIIPSDNQSHPRISNIHDNAIDMVTLKNGEEVAISWYDISHQTQVLSFLLIVLLKLLGMPKESSTIQQVVKKIMSFFKFLDSDSPPQNSRTCYSNFAVLIAGLNAMDEETRAIVKRYYKINGGKFQKLTEHNLNRLEKVWYGKNQNYRLEEQDVLTW

SEQ ID NO: 185 - DNA, 1254 bp, Saccharomyces cerevisiae
atgataatatttaatgggaacaaatatgcgtgtgcatcgtgcatcagagggcatcgctcttcaacatgcaggcattctcaccgaatgctaattaaggtgagaactagaggaagaccttcacccatggctatcagagacgctattttagtagactctacatcgcaaagtacagaatacgaaaatggtgcacaaattgaaggtgactgctgcagcgcaatgaatcaacagccaatactgtttgtacgtgcctctgctgttagaaaggcaagaatgataaacggaaaattgcatatattaatggaggaaggtttcactgctcatgagcctaaagatattagcacatttaccgatgatggtaacaaatatatcaccgaaacggagtttcttaggaaacactctcccaaagctccggcaacaggaacaatatctccggactctaccaagtcatcttcttcaagtgagaagaaagagcgaagccggcttcaacaggagcctatacgacatttttcaaactgctgtaagaaagataaatcacagaacccagcttctaatggcaagacgaacaaggcaccgtctgatgacatatttacgccatacggctccttggaatctacgtccgcttttaacgatattttacaagaaaactacaatagttctgttcctggtgcgcatgacagttcagaaacactcaccccacaaagtacaacaacgattgctgctcctcattcaagcgacgttgcttcgaaagttgaagtcctgactcataagggcatttttttaagcacgcagtgctcttgtgaagatgaaagctgcccatgtgttaattgtctaatccatagaagcgaagaggaactgaattcttatattcaacaaagtggtgttcctttaaccaatattggtgaagctcaaattactgataagatgatggattatttggatgattgtaaatgcactgacaaggaatgcatatgtcctccggataactgcacttgtgatggatgtttttctcactctacaaatataattccatttgaaaaattctttttctatggaattctgaatgcaagattaacaaggaaaactcaaataaaattcaaaggtaaattggtgccgtcaaaatattggtgggattttttgaagttgcaagtgccattgatgacagatgctcagttagaattacttgacattcatgcgtggtttcaaaaattagtctctaattatgcaccacatctaagcgatgccaccacttcataa

SEQ ID NO: 186 - protein, 417 aa, Saccharomyces cerevisiae
MIIFNGNKYACASCIRGHRSSTCRHSHRMLIKVRTRGRPSPMAIRDAILVDSTSQSTEYENGAQIEGDCCSAMNQQPILFVRASAVRKARMINGKLHILMEEGFTAHEPKDISTFTDDGNKYITETEFLRKHSPKAPATGTISPDSTKSSSSSEKKERSRLQQEPIRHFSNCCKKDKSQNPASNGKTNKAPSDDIFTPYGSLESTSAFNDILQENYNSSVPGAHDSSETLTPQSTTTIAAPHSSDVASKVEVLTHKGIFLSTQCSCEDESCPCVNCLIHRSEEELNSYIQQSGVPLTNIGEAQITDKMMDYLDDCKCTDKECICPPDNCTCDGCFSHSTNIIPFEKFFFYGILNARLTRKTQIKFKGKLVPSKYWWDFLKLQVPLMTDAQLELLDIHAWFQKLVSNYAPHLSDATTS

SEQ ID NO: 187 - DNA, 861 bp, Saccharomyces cerevisiae
atgtcagacatcgaagaaggtacgcctactaataatgggcaacagaaggagagaagaaagatagaaattaagttcatcgagaataaaacaaggcgccatgtgacattttccaaaaggaagcacggtatcatgaaaaaggcgtttgagctttctgttctaacggggacccaggtcctgttgctagtcgtttcagaaacaggtttggtatatactttcagcacgccgaagtttgaacctatagtcacgcagcaggaaggtagaaacctgatccaggcctgtcttaacgcccctgatgatgaggaagaagacgaggaggaagacggtgatgatgatgatgatgatgacgatgatggtaatgatatgcaacgccagcaaccacaacaacagcaaccgcaacaacagcaacaagtattgaatgcacacgcaaatagcttaggccatctaaatcaagatcaggtaccggcaggcgcgctgaaacaagaggtgaagtcacaattgctaggcggtgccaatcctaatcaaaactcaatgattcaacagcagcaacatcacacgcagaattcacaaccacaacagcaacagcaacaacaaccacagcagcaaatgtcacagcaacaaatgtcacagcatcctcgaccacagcaaggaataccacatccgcaacaatcgcagccacagcaacagcaacaacaacaacaacaactgcaacagcagcaacagcagcaacaacaacaacccctcaccggcattcatcagcctcaccaacaggcttttgccaacgctgcctccccctatctgaatgctgaacagaatgctgcctaccaacaatactttcaagaaccgcaacaaggccaatactaa

SEQ ID NO: 188 - protein, 286 aa, Saccharomyces cerevisiae
MSDIEEGTPTNNGQQKERRKIEIKFIENKTRRHVTFSKRKHGIMKKAFELSVLTGTQVLLLVVSETGLVYTFSTPKFEPIVTQQEGRNLIQACLNAPDDEEEDEEEDGDDDDDDDDDGNDMQRQQPQQQQPQQQQQVLNAHANSLGHLNQDQVPAGALKQEVKSQLLGGANPNQNSMIQQQQHHTQNSQPQQQQQQQPQQQMSQQQMSQHPRPQQGIPHPQQSQPQQQQQQQQQLQQQQQQQQQQPLTGIHQPHQQAFANAASPYLNAEQNAAYQQYFQEPQQGQY

SEQ ID NO: 189 - DNA, 1695 bp, Candida albicans
atgcattacagatttttaagagatagttttgttggtagagtgacttatcatttatcgaaacataaatactttgcccatccagaagaagctaaaaattatattatccccgagaaatatttagccgattacaaaccaactcttgctgatgatacaagtataaattttgaaaaagaagaaatagataatcaaggtgaacccaattcaagtcaatcatcatcttccaataacacaatagtcgacaacaacaacaataataataatgatgttgatggagataaaatagttgtcacttgggatggtgatgatgatcccgaaaaccctcaaaattggccaactttacaaaaagcatttttcattttccaaatttcatttttgacaacttcagtttatatgggatcagcagtatatacccctggtattgaagaattaatgcatgattttggtattggaagagtcgtagctacattgccattaacattatttgttattggttatggtgttggcccattggttttcagtcccatgtcagaaaatgctatatttggtcgtacatccatatatatcataacattatttttatttgtcatactacaaatccccactgctttggtaaataatattgccggtttatgtatattgagattcttgggtggattcttcgccagtccttgtttggccactggtggcgcaagtgttgctgatgtggttaaattttggaatttaccagttgggttagccgcttggagtttaggtgctgtttgtggtcctagttttggtccattctttggttcaattttaactgtcaaagccagttggagatggactttttggttcatgtgtatcatttctgggttttcatttgttatgttgtgtttcactttacctgaaacttttggcaaaacattattgtatcgcaaggctaaaagattgagagccatcaccggtaacgacagaatcacaagtgaaggagaaattgaaaatagcaaaatgacaagtcatgaattgatcattgatacattatggagaccattagaaatcaccgttatggaaccagttgttcttttgattaacatttacattgccatggtgtacagtattctttacttgtttttcgaagttttcccaatttatttcgttggagttaaacatttcaccctcgttgaattgggtaccacatatatgtcgattgttattggtattgtcattgctgcctttatttatattccagttattagacaaaaattcaccaaaccaatattacgtcaagaacaagttttccccgaagtatttattccaattgccattgttggtggtatcttgttaacttcaggtcttttcatttttggttggtcagcaaatagaaccactcattgggttggtccattgtttggtgctgccactactgcttctggtgcatttttgattttccaaacattattcaatttcatgggtgcttcatttaagcctcactatattgcttcagtttttgcatcaaatgatttgttcagatcagtcattgcatcagtgttcccattatttggtgctcctttgtttgacaatttggccacccctgaatatccagttgcttggggtagttccgtgttgggtttcatcacccttgttatgattgctattccagttttgttttacttgaacggaccaaagttgagagcaagatctaagtatgctaattag

SEQ ID NO: 190 - protein, 564 aa, Candida albicans
MHYRFLRDSFVGRVTYHLSKHKYFAHPEEAKNYIIPEKYLADYKPTLADDTSINFEKEEIDNQGEPNSSQSSSSNNTIVDNNNNNNNDVDGDKIVVTWDGDDDPENPQNWPTLQKAFFIFQISFLTTSVYMGSAVYTPGIEELMHDFGIGRVVATLPLTLFVIGYGVGPLVFSPMSENAIFGRTSIYIITLFLFVILQIPTALVNNIAGLCILRFLGGFFASPCLATGGASVADVVKFWNLPVGLAAWSLGAVCGPSFGPFFGSILTVKASWRWTFWFMCIISGFSFVMLCFTLPETFGKTLLYRKAKRLRAITGNDRITSEGEIENSKMTSHELIIDTLWRPLEITVMEPVVLLINIYIAMVYSILYLFFEVFPIYFVGVKHFTLVELGTTYMSIVIGIVIAAFIYIPVIRQKFTKPILRQEQVFPEVFIPIAIVGGILLTSGLFIFGWSANRTTHWVGPLFGAATTASGAFLIFQTLFNFMGASFKPHYIASVFASNDLFRSVIASVFPLFGAPLFDNLATPEYPVAWGSSVLGFITLVMIAIPVLFYLNGPKLRARSKYAN

SEQ ID NO: 191 - DNA, 1479 bp, Saccharomyces cerevisiae
atggagagtcgaactacagggcctttaacgactgaaacctacgatggccccactgtggccttcatgatattaggtgccgccctagtattttttatggtgcccggattgggattcttgtactccggattggcaagaaggaagtctgcactagcactaatctgggttgtattaatggcgactttggtcggtatactgcaatggtatttctggggttactctctagctttttcaaagtccgctccgaataataaattcattgggaatctagattcgtttggctttagaaacgtgtacggaaaaaaattcgatgaagatgcctaccctgagctcgcgtatgcaaccttccaaatgatgttttcgtgcgtcaacttaagtattatcgctggcgccactgccgaaagaggcaggctgctaccgcacatggtttttctctttattctagctaccattggatattgtccagtgacgtattggatttggtcaccaggtggttgggcataccaatggggagtcctcgattgggcaggcggcggcaacattgaaatattaagcgctgtttccgggtttgtttactcttggtttttgggcaaaagaaatgaaaagttactgataaatttcaggcctcataatgtttcattggtcactctaggcacatccatactgtggtttggctggctgctatttaattctgcatcctcattatccccaaatttgaggtcagtttatgcattcatgaatacatgtctcagtgccattactggtgggatgacgtggtgtcttctggattacagatcggagaagaaatggtcgacagttggtctgtgctccggtatcatttctgggctggtggctgcaacgccaagctcaggctgtataaccctttacggttcacttattcaaggcattgtggcgggggtagtgtgtaactttgcgacgaagttgaaatactacgctaaagtagatgatgccatggacattctagctgagcacggggttgcaggcgtaataggactaattttcaatgccctttttggagcagactgggtcattggtatggatggcactacagagcacgagggcggctgggtaactcacaattacaagcaaatgtataagcagatcgcttacattgccgcatccattgggtacactgctgctgtaactgcaataatctgctttgtgctcggctacatacccggtatgaggctaagaatatcagaagaggcagaggaggcgggtatggacgaagatcaaattggcgaatttgcgtacgattatgtggaagtgagaagagattactatctatggggtgtagacgaagattcacaacgctctgatgtaaatcaccgggtgaacaacgctcatttggccgctgaacgtagcagtagcggtactaatagttcctcggatgggaatggagaaatgattcaatccgaaaagatcctaccaattcatcaagaagatcctgccaataggtaa

SEQ ID NO: 192 - protein, 492 aa, Saccharomyces cerevisiae
MESRTTGPLTTETYDGPTVAFMILGAALVFFMVPGLGFLYSGLARRKSALALIWVVLMATLVGILQWYFWGYSLAFSKSAPNNKFIGNLDSFGFRNVYGKKFDEDAYPELAYATFQMMFSCVNLSIIAGATAERGRLLPHMVFLFILATIGYCPVTYWIWSPGGWAYQWGVLDWAGGGNIEILSAVSGFVYSWFLGKRNEKLLINFRPHNVSLVTLGTSILWFGWLLFNSASSLSPNLRSVYAFMNTCLSAITGGMTWCLLDYRSEKKWSTVGLCSGIISGLVAATPSSGCITLYGSLIQGIVAGVVCNFATKLKYYAKVDDAMDILAEHGVAGVIGLIFNALFGADWVIGMDGTTEHEGGWVTHNYKQMYKQIAYIAASIGYTAAVTAIICFVLGYIPGMRLRISEEAEEAGMDEDQIGEFAYDYVEVRRDYYLWGVDEDSQRSDVNHRVNNAHLAAERSSSGTNSSSDGNGEMIQSEKILPIHQEDPANR

SEQ ID NO: 193 - DNA, 1500 bp, Saccharomyces cerevisiae
atgtcttacaattttacaggtacgcctacaggcgaaggaacgggtggtaactcgttgacaacagatttgaatacacaatttgacttggccaacatgggatggatcggtgtggcttcagcaggtgtgtggattatggtcccaggtatcggtttattatattctggtttatccaggaaaaagcatgctttatccttgctttgggcctcgatgatggcttccgccgtgtgtattttccaatggtttttctggggatactcattagctttctcacacaacactagaggtaacggttttattggtaccttggaattctttgggtttcgtaacgttttaggagccccatctagtgtcagttctcttcccgatatactgtttgccgtttaccaaggtatgtttgccgcagtcaccggtgccctaatgctaggtggtgcctgcgagagggcaaggttgtttcctatgatggtgttcttgtttttatggatgactattgtttattgtcctattgcatgctgggtctggaatgccgagggttggttggtcaaattgggtagcttggactatgcaggtggtttatgtgtccatttaacatctggacatggtggtctagtttacgctttgatactgggtaagcgtaatgaccctgttacacgtaaagggatgcccaagtacaaaccacattccgtcacctcggtggttttaggcacagtgttcttatggtttggttggatgttctttaacggaggctctgcaggtaatgcaactatacgagcatggtactctattatgtccacaaacttagctgctgcttgcggtggcttgacatggatggttatcgattatttcagatgcggaagaaagtggactacagttggtttgtgttcaggtatcatcgctggcctagtgggtatcaccccagccgccgggttcgtgccaatctggtcagccgttgtcattggtgtggttactggtgcaggatgtaaccttgctgttgacttaaagagtctattgcgcatcgatgatggtctagattgttactctatccatggtgtgggtggttgtattggttctgtattaactggtatctttgctgcagactatgtaaatgccactgcaggctcttacattagtccaattgatggtggctggatcaatcatcactataaacaagttggttatcaattagcaggtatatgcgctgcactagcctggactgttactgtcacatctatcttgcttctaactatgaatgccattccatttttaaaactaagattaagtgctgatgaggaagaattaggtaccgacgctgctcaaattggtgaatttacatacgaggaatccactgcttacatcccagaaccaatcagatctaaaacatcggcacaaatgccacctcctcatgaaaacattgatgataagattgtgggtaacacagacgcagaaaagaattctacgccttccgacgcttcttctactaagaacactgaccatatagtataa

SEQ ID NO: 194 - protein, 499 aa, Saccharomyces cerevisiae
MSYNFTGTPTGEGTGGNSLTTDLNTQFDLANMGWIGVASAGVWIMVPGIGLLYSGLSRKKHALSLLWASMMASAVCIFQWFFWGYSLAFSHNTRGNGFIGTLEFFGFRNVLGAPSSVSSLPDILFAVYQGMFAAVTGALMLGGACERARLFPMMVFLFLWMTIVYCPIACWVWNAEGWLVKLGSLDYAGGLCVHLTSGHGGLVYALILGKRNDPVTRKGMPKYKPHSVTSVVLGTVFLWFGWMFFNGGSAGNATIRAWYSIMSTNLAAACGGLTWMVIDYFRCGRKWTTVGLCSGIIAGLVGITPAAGFVPIWSAVVIGVVTGAGCNLAVDLKSLLRIDDGLDCYSIHGVGGCIGSVLTGIFAADYVNATAGSYISPIDGGWINHHYKQVGYQLAGICAALAWTVTVTSILLLTMNAIPFLKLRLSADEEELGTDAAQIGEFTYEESTAYIPEPIRSKTSAQMPPPHENIDDKIVGNTDAEKNSTPSDASSTKNTDHIV

SEQ ID NO: 195 - DNA, 564 bp, Saccharomyces cerevisiae
atgagtgcgaaacaagggtgggaaaagaaatcaacaaacattgacattgcaagcaggaagggtatgaacgtgaacaatctttcggaacatctacagaacctgatatcaagcgattcagagctgggctcgcgcttgctatcattgctgctggttagcagtggcaacgcggaggagctcattagcatgataaataatggccaggatgtctcgcagtttaagaagctccgcgagccgagaaaggggaaggttgccgcaacaacagcagttgttgtaaaagaagaggaagctcccgtgagcacttctaacgaactggataagattaagcaagagcggagaagaaagaacacagaggcgtcgcagcggttccgcattcgcaagaaacaaaagaattttgagaacatgaataagctgcagaacttaaacacgcaaatcaacaaacttcgcgatcgtatagagcaattgaacaaggaaaatgagttttggaaagcaaagctcaatgacattaacgagattaagtctttgaaattgttgaatgacattaagagacggaacatgggcaggtag

SEQ ID NO: 196 - protein, 187 aa, Saccharomyces cerevisiae
MSAKQGWEKKSTNIDIASRKGMNVNNLSEHLQNLISSDSELGSRLLSLLLVSSGNAEELISMINNGQDVSQFKKLREPRKGKVAATTAVVVKEEEAPVSTSNELDKIKQERRRKNTEASQRFRIRKKQKNFENMNKLQNLNTQINKLRDRIEQLNKENEFWKAKLNDINEIKSLKLLNDIKRRNMGR

SEQ ID NO: 197 - DNA, 534 bp, Saccharomyces cerevisiae
atgaaactggcgcaagacatgaatgtagatgaaatatttctcaaacaagcggcagaagctatagcggtaatctcatcaagtcccactcatacggaccccataatacgagagctactccacagaattcgacaatccagcccattgagcgcagttataccagcaccagaaaatgttttaaaggctggggagccggaaaatatggctagaggtcttataaggattccagaaacacaaacaaaaagaacaggaggtaacaaccatagcaaggaaggcgcacagctctacagctgtgcgaaatgtcagttgaaattcagcagaagttctgatctgagaagacatgaaaaggtacactcactcgtgctgccgcatatttgctcaaactgtggcaaagggtttgccaggaaggatgctctaaaaagacattctaacacactgacctgtcaaagaaacagaaagaaactaagtgaaggttcagacgttgatgtagatgagctcatcaaggatgcgataaagaatggtaccggcctgttgtaa

SEQ ID NO: 198 - protein, 177 aa, Saccharomyces cerevisiae
MKLAQDMNVDEIFLKQAAEAIAVISSSPTHTDPIIRELLHRIRQSSPLSAVIPAPENVLKAGEPENMARGLIRIPETQTKRTGGNNHSKEGAQLYSCAKCQLKFSRSSDLRRHEKVHSLVLPHICSNCGKGFARKDALKRHSNTLTCQRNRKKLSEGSDVDVDELIKDAIKNGTGLL

SEQ ID NO: 199 - DNA, 2019 bp, Saccharomyces cerevisiae
atgaagcaggagcagtcccacgaaggcgactcatacagcacggaattcataaatctctttggcaaagataccgcaacacaccctagcagcaacaacggtgctaataataatggcatggggagcacgaactcgttggaccagtttgtggcaacagcctcatcgtcatcttctctggtgaccagcagcgagaataggcgccccctaataggtgacgttaccaataggggcaacactaacctatatgaccacgctgtcacgccagaaatactcttagaacagttggcctacgtggataacttcataccatctctggataacgagttctctaatgtggattggaatgtgaataccacccataataatgcaaacaataatggcgcggacactttcagcagcataaatgcaaatccttttgacttggatgaacaactagccattgagttgagtgcgtttgccgacgattctttcatcttcccagacgaggataagccgagcaataacaataacaacagcaataatggtaatgacgaccatagcaaccacgacgtattgcatgaggacccttctaccaataatagacaaagaaatcctcacttcttgactcaaagaaggaatactttcctaacttcccaatacgaccaatcaaagtctcgattttcgtccaaaaacaaaagaaatggcaataacggcgaaacaaacaactttggcgacaatatgcaaaataaccatccttttgagccaaactttatgggaagcccttctcagtttcccgctgacgcaactaatatgacatcaatcgaccatggcggcttcacaaatgttgacattacatcaactgagaacaatactaccggtgacaatggagtggatgcgctatcaaatctactacataggacaacacacacaccgaaccgctcctcccccctaagcaatgtcacttctgctcaaaattcctcttcacaacaacgaaaacattcggaaagcaaagtcgatagtaacagcgataataacagctccaacaaagcccccaatataactgttcctgactattcaattataccaacctctgttttagtaactctattaccgagggtcaacgtgcccaacggcgcatataactcgttgatcagcgcgggatttgacaatgatcaaatagatgctatagccgcaataatggcgtatcatcatcaaaaaaagattagggaaaataacagtaataataataaaaacatcaacaccaatgacagtcaagaggcacccattctaaaaaacatcaacgaacttttaagtgtcttaataccaccctctccggctgaaactcgtgggccaactaccttatcaacgtcgccttcgttcaatgagcacggtgtagtagcagaggcttcttttctaagctccattttggaactgggcataaagcatccaaaaagtaataatattcacaatcaacgacaaccttcacgaaacgatcataaaatatcaagagagagtgacggtaacaatggaaacgataatgtccatcataataacgctgttattaagtcaagtacgacgcgtggagacgaaattgccaagatacgatccgagccaactttaaatgcaagttcttctgatcacaaggaaaatagtttaaaaagatcacactccggagatttgaaaaataaaaaagtacccgtcgaccgcaagtattctgataatgaagacgatgaatatgacgatgcagatttacacggctttgaaaagaagcaactgatcaagaaagagttaggggacgacgatgaagatttattgatacagtcgaaaaaatctcatcaaaaaaaaaaactaaaggaaaaggagttagaatcatcgatacatgaactgaccgaaattgcagcatccttacaaaaacggatacatacgttagaaacggaaaacaagcttttaaagaatttagttctgagtagcggtgaaacggaaggaataaaaaaagctgaaagcttaaagaagcaaatttttgagaaggttcagaaagaataa

SEQ ID NO: 200 - protein, 672 aa, Saccharomyces cerevisiae
MKQEQSHEGDSYSTEFINLFGKDTATHPSSNNGANNNGMGSTNSLDQFVATASSSSSLVTSSENRRPLIGDVTNRGNTNLYDHAVTPEILLEQLAYVDNFIPSLDNEFSNVDWNVNTTHNNANNNGADTFSSINANPFDLDEQLAIELSAFADDSFIFPDEDKPSNNNNNSNNGNDDHSNHDVLHEDPSTNNRQRNPHFLTQRRNTFLTSQYDQSKSRFSSKNKRNGNNGETNNFGDNMQNNHPFEPNFMGSPSQFPADATNMTSIDHGGFTNVDITSTENNTTGDNGVDALSNLLHRTTHTPNRSSPLSNVTSAQNSSSQQRKHSESKVDSNSDNNSSNKAPNITVPDYSIIPTSVLVTLLPRVNVPNGAYNSLISAGFDNDQIDAIAAIMAYHHQKKIRENNSNNNKNINTNDSQEAPILKNINELLSVLIPPSPAETRGPTTLSTSPSFNEHGVVAEASFLSSILELGIKHPKSNNIHNQRQPSRNDHKISRESDGNNGNDNVHHNNAVIKSSTTRGDEIAKIRSEPTLNASSSDHKENSLKRSHSGDLKNKKVPVDRKYSDNEDDEYDDADLHGFEKKQLIKKELGDDDEDLLIQSKKSHQKKKLKEKELESSIHELTEIAASLQKRIHTLETENKLLKNLVLSSGETEGIKKAESLKKQIFEKVQKE

SEQ ID NO: 201 - DNA, 885 bp, Aspergillus nidulans
atggctgaatacaatggccgccgtgcgcccaacttctcgcaatatctggacgatttgaatgccattccttcgccctacgatgtcgcgatgcagcagcagcaacagcaggatgggttcaatatcgataacgacctatcgctgttcactaataccgagtttttcgacttcgatctgaacctcccgccattcgaacccgtcgaggagaacaagcacaacgttaaccaaaactccgatatggatttcttggatatactgggtggtgaagggtttggcaatgtcaacgactatgcccctcagatgaattcgataaacaaccaatctgtacccgtgcagaatgctcagttccatgccgtgccgcagtcgcaggttcccgggttgcctaacgttagcgcccaagtgaaccagtccgtcaattcccgggcaaccgcctccccttctcagtcttctgtcgctgccccgagtcccacgaacgctacctccctcgcagctcctgctccaggccctaagcgcaagcacacgcagaagactgtcccagttagcgtggaggaggctgcacgaattgctgctgatgaggacaagcgccgccgcaacaccgccgccagcgcccgcttccgagtcaaaaagaagatgcgcgagcaagctctggaaaagaccgtcaaggatactaccgaaaagaacgccgcgctggaagcccgtgtcaccgccctcgagctcgagaatcaatggctcaagaacctgattaccgagaagaacggcaagtccgcggaagaaggaaaaaaggcggagaacgacatctcggacatgttcaagaagtttcttgctgcacagaagaccgagggcgagcgaagtaacggcaactccaaaatcggcgttggtaccgtttag

SEQ ID NO: 202 - protein, 294 aa, Aspergillus nidulans
MAEYNGRRAPNFSQYLDDLNAIPSPYDVAMQQQQQQDGFNIDNDLSLFTNTEFFDFDLNLPPFEPVEENKHNVNQNSDMDFLDILGGEGFGNVNDYAPQMNSINNQSVPVQNAQFHAVPQSQVPGLPNVSAQVNQSVNSRATASPSQSSVAAPSPTNATSLAAPAPGPKRKHTQKTVPVSVEEAARIAADEDKRRRNTAASARFRVKKKMREQALEKTVKDTTEKNAALEARVTALELENQWLKNLITEKNGKSAEEGKKAENDISDMFKKFLAAQKTEGERSNGNSKIGVGTV

SEQ ID NO: 203 - DNA, 1371 bp, Saccharomyces cerevisiae
atgcaacctaaaactttcgtccaccaacttcatgcaattcttctggaaccggaagtaaataaatggatatactggtctccgactgataacacggtattttttttgaagccatatgaccctaattttagtacacatgttctgaagcgttatttcaaacatggaaatgtcaatagttttgttcgtcaactacacatgtacgggtttcataaactatctcatccttccccagaccaatcttctgccaacaatggtaacgttaaagaacttgttgaatggaaatttacccacccatctggattcttcttcaaagaggccaacgccggtatcttgaataaaatccaaagaaagagcactggtgtgggaaaagatggtaaaagaaagaatatactgtcaccaatatctgtcagttacgttgatgcttcgaggttaaatgttctctctcagcaatccggaccagtttctgcaagagaaccatcaaacatgtttatgggcagtcccgtccattactcaacatcccaaagtcctccacatatcagtataccgcaacagcaacaaagtagtggaccttacctaatatcttcactgccccctcaacaacccacggtgaacatgatgcgaaggcaaagcatctcggcgaggatgatgaattcttatgactatcccaatcaattttccacccaagatagcatagtccagcctcagcagccgcaacaagtactttctccacaagcattatctggacctccgatgaagaaatcaggaacactatcttcgacagatgatctgaaaacaacttccttgccaattgttaattacccaatgccgtatcatcctggagcttttgcccagcagcagcagcagcagcagcaaccgctccctacagtcccgccatatagcagttactccactccatttccctcaatgatgaactctctttcgaactctgcttctaactcacctgctttaggagtttgtaataataatgtaacactacccaaaaaaagcaatataagtgaaaggcaagctttggataaccatatacaaactttaaagaactctctatcaacaatcactgatttgatagaaaaacatattaacagcgcatcgcaagatgaaaataaaactctaactaatgatgccatgaacaaagaccttcgaacaagcttatccctattacagaattccaaggaggaaatcattcaacttgaaagtaaatggatgtctatgcaatctgttaaaacaactgccctaccccttcaagagactacgaatacatcatcgaccttaacttctctgacgtccagcataattcccaagagtatacctataatcacgaaaggtgaagtcgccactaaaccagcatcttactga

SEQ ID NO: 204 - protein, 456 aa, Saccharomyces cerevisiae
MQPKTFVHQLHAILLEPEVNKWIYWSPTDNTVFFLKPYDPNFSTHVLKRYFKHGNVNSFVRQLHMYGFHKLSHPSPDQSSANNGNVKELVEWKFTHPSGFFFKEANAGILNKIQRKSTGVGKDGKRKNILSPISVSYVDASRLNVLSQQSGPVSAREPSNMFMGSPVHYSTSQSPPHISIPQQQQSSGPYLISSLPPQQPTVNMMRRQSISARMMNSYDYPNQFSTQDSIVQPQQPQQVLSPQALSGPPMKKSGTLSSTDDLKTTSLPIVNYPMPYHPGAFAQQQQQQQQPLPTVPPYSSYSTPFPSMMNSLSNSASNSPALGVCNNNVTLPKKSNISERQALDNHIQTLKNSLSTITDLIEKHINSASQDENKTLTNDAMNKDLRTSLSLLQNSKEEIIQLESKWMSMQSVKTTALPLQETTNTSSTLTSLTSSIIPKSIPIITKGEVATKPASY

SEQ ID NO: 205 - DNA, 1131 bp, Saccharomyces cerevisiae
atgttgtctttcacaaccaagaatagtttccgcttattacttttaatactgtcatgcatatcgacgatacgcgcacaatttttcgtgcaatcatcatcttcgaattcttcagcagtatctactgcacgttcttccgtaagtagagttagttcttcaagttccattttgtcatccagtatggtttcttcctcaagtgctgactcatcttcccttacttcatcgacatcaagtaggtccctcgtgtcacatacgagttcgtctaccagcattgcctccatatcgttcacatcattcagtttctcatcagattcaagcaccagcagctcttcctctgcttcttcagattcttcatcctcctcatccttttccatctcttcgacatccgcaacttctgaatcatcgacgtcttctacgcaaacgtcaacatcatcttcatcctcactgtcgtcaacgccgtcctcttcatcatccccatcaacaatcacttctgcaccttcaacctcctccacaccatccactactgcctataatcaaggaagcactatcaccagtattattaacggtaagacgattctctcaaatcattatactaccgttacgtacacaccatcagcaaccgctgattcaagcaataaatccaaaagttcgggtctttctaaaaaaaatagaaacatcgtcattggttgtgtggttggtattggtgtaccactgattctggtgatactggctttaatttacatgttttgtatccaatcatcaaggacggactttattgactcagatggtaaggtcgttacggcatatagagctaacaaatttacgaaatggtggtatatgcttttgggtaagaaagttagtgatgaataccactccgattcaccattaggtggtagtgcatcgtccgcaggtggtttagacctagatgaagcagatgatgtgatggagcaaagctcccttttcgacgtcagaataagagatagcgatagcgtattaccaaacgccaacaccgccgaccataataataccaatagcggtggagagcctataaatagtagcgttgcgtcaaatgacataatagaagaaaaattctatgatgaacaaggtaacgaattatcaccacgaaattattaa

SEQ ID NO: 206 - protein, 376 aa, Saccharomyces cerevisiae
MLSFTTKNSFRLLLLILSCISTIRAQFFVQSSSSNSSAVSTARSSVSRVSSSSSILSSSMVSSSSADSSSLTSSTSSRSLVSHTSSSTSIASISFTSFSFSSDSSTSSSSSASSDSSSSSSFSISSTSATSESSTSSTQTSTSSSSSLSSTPSSSSSPSTITSAPSTSSTPSTTAYNQGSTITSIINGKTILSNHYTTVTYTPSATADSSNKSKSSGLSKKNRNIVIGCVVGIGVPLILVILALIYMFCIQSSRTDFIDSDGKVVTAYRANKFTKWWYMLLGKKVSDEYHSDSPLGGSASSAGGLDLDEADDVMEQSSLFDVRIRDSDSVLPNANTADHNNTNSGGEPINSSVASNDIIEEKFYDEQGNELSPRNY

SEQ ID NO: 207 - DNA, 1515 bp, Saccharomyces cerevisiae
atgcaaagcccatatccaatgacacaagtgtctaacgttgatgatgggtcactattgaaggagagtaaaagcaagtccaaagtagctgcgaagtcagaggcgccaagaccacatgcttgtcctatctgtcatagagcttttcacagactggaacatcagacgagacacatgagaattcatacaggtgagaagcctcacgcgtgtgacttccccggatgtgtgaaaaggttcagtagaagcgatgaactgacgagacacagaagaattcatacaaactcccaccctcgaggtaaaagaggcagaaagaagaaggttgtgggctctccaataaatagtgctagttctagtgctaccagtataccagatttaaatacggcaaatttttcaccgccattaccacagcaacacctatcgcctttaattcctattgctattgctccgaaagaaaattcaagtcgatcttctacaagaaaaggtagaaaaaccaaattcgaaatcggcgaaagtggtgggaatgacccatatatggtttcttctcccaaaacgatggctaagattcccgtctcggtgaagcctccaccttctttagcactgaataatatgaactaccaaacttcatccgcttccactgctttgtcttcgttgagcaatagccatagtggcagtagactgaaactgaacgcgttatcgtccctacaaatgatgacgcccattgctagcagtgcgccaaggactgttttcatagacggtcctgaacagaaacaactacaacaacaacaaaattctctttcaccacgttattccaacactgttatattaccaaggccgcgatctttaacggattttcaaggattgaacaatgcaaatccaaacaacaatggaagtctcagagcacaaactcagagttccgtacagttgaagagaccaagttcagttttaagtttgaacgacttgttggttggccaaagaaataccaacgaatctgactctgattttactactggtggtgaggatgaagaagacggactaaaggacccgtctaactctagtatcgataaccttgagcaagactatttgcaagagcaatcaagaaagaaatctaagacttccacgcccacgacaatgctaagtagatccactagtggtacgaatttgcacactttggggtatgtaatgaaccaaaatcacttgcatttctcctcatcatctcctgatttccaaaaggagttgaacaacagattactgaacgttcaacaacagcagcaagagcaacataccctactgcaatcacaaaatacgtcaaaccaaagtcaaaatcaaaatcaaaatcaaatgatggcttccagtagttcgttaagtacaaccccgttattattgtcaccaagggtgaatatgattaatactgctatatccacccaacaaacccccatttctcagtcggattcacaagttcaagaactggaaacattaccacccataagaagtttaccgttgcccttcccacacatggactga

SEQ ID NO: 208 - protein, 504 aa, Saccharomyces cerevisiae
MQSPYPMTQVSNVDDGSLLKESKSKSKVAAKSEAPRPHACPICHRAFHRLEHQTRHMRIHTGEKPHACDFPGCVKRFSRSDELTRHRRIHTNSHPRGKRGRKKKVVGSPINSASSSATSIPDLNTANFSPPLPQQHLSPLIPIAIAPKENSSRSSTRKGRKTKFEIGESGGNDPYMVSSPKTMAKIPVSVKPPPSLALNNMNYQTSSASTALSSLSNSHSGSRLKLNALSSLQMMTPIASSAPRTVFIDGPEQKQLQQQQNSLSPRYSNTVILPRPRSLTDFQGLNNANPNNNGSLRAQTQSSVQLKRPSSVLSLNDLLVGQRNTNESDSDFTTGGEDEEDGLKDPSNSSIDNLEQDYLQEQSRKKSKTSTPTTMLSRSTSGTNLHTLGYVMNQNHLHFSSSSPDFQKELNNRLLNVQQQQQEQHTLLQSQNTSNQSQNQNQNQMMASSSSLSTTPLLLSPRVNMINTAISTQQTPISQSDSQVQELETLPPIRSLPLPFPHMD

SEQ ID NO: 209 - DNA, 1149 bp, Saccharomyces cerevisiae
atgcctaaaaagcaaacgaatttcccagtagataacgaaaacagaccttttagatgtgatacctgtcaccgtggtttccatcggttagaacataaaaagagacacttgagaacacacactggggaaaaacctcatcattgcgcatttcctggttgtgggaaaagtttcagtagaagcgatgaactgaaaaggcacatgagaacgcatacagggcaatctcaaaggagattgaagaaagctagcgtacagaaacaggagtttttgacagtaagcggaattcctaccattgcatcgggcgtgatgatacaccaaccaataccgcaagtcctaccagcaaatatggccataaatgttcaggcagtaaatggaggtaacattatacacgctcccaatgcggtgcacccaatggtgataccaatcatggcccaaccagcccccattcatgcctccgctgcatctttccagcctgcaacttctcctatgccaatttctacatacactccagttccatcgcaatcattcacctctttccagagctctattggctccatacagtcaaatagtgatgtttcatctatcttctcgaacatgaatgttcgcgtaaacactccacgctctgtgccaaactctccgaatgatggatatttacaccagcaacatatcccacagcagtatcagcatcaaactgccagcccttctgttgccaagcagcagaaaacttttgcacattctcttgcatctgcattatctaccttacaaaaaagaacgcctgtaagtgccccttccaccactatagaatcaccatcctcaccaagtgattccagtcatacctctgcatccagcagcgctatctctttgcctttcagcaatgctccttctcagctcgccgtggccaaagaacttgagtccgtctatttagattccaatagatacaccaccaagactaggagggaaagagcaaaattcgaaattcctgaagaacaagaagaagataccaataacagcagcagtggtagtaatgaggaggagcacgagtcgctagatcatgaatctagcaaaagccgaaagaaattgtcaggcgtaaaattgccgcctgtacgtaacctactgaaacaaattgatgttttcaacggtcccaaaagagtttaa

SEQ ID NO: 210 - protein, 382 aa, Saccharomyces cerevisiae
MPKKQTNFPVDNENRPFRCDTCHRGFHRLEHKKRHLRTHTGEKPHHCAFPGCGKSFSRSDELKRHMRTHTGQSQRRLKKASVQKQEFLTVSGIPTIASGVMIHQPIPQVLPANMAINVQAVNGGNIIHAPNAVHPMVIPIMAQPAPIHASAASFQPATSPMPISTYTPVPSQSFTSFQSSIGSIQSNSDVSSIFSNMNVRVNTPRSVPNSPNDGYLHQQHIPQQYQHQTASPSVAKQQKTFAHSLASALSTLQKRTPVSAPSTTIESPSSPSDSSHTSASSSAISLPFSNAPSQLAVAKELESVYLDSNRYTTKTRRERAKFEIPEEQEEDTNNSSSGSNEEEHESLDHESSKSRKKLSGVKLPPVRNLLKQIDVFNGPKRV

SEQ ID NO: 211 - DNA, 1527 bp, Saccharomyces cerevisiae
atggcttcactgttcagacccccagaatctgcgaaatgcaacccaaactctcctagacttaaactgcccctcttacgaaataatcaggtagatgaaaataatatatacttgacgtcgaatgggagttccaccacagcttacagtagccacaccccagaaccactgacctcttccacatcgacacttttctcccaaactcgacttcatcctagcgactcttcaatgactttaaatacaatgaagaagaggcctgcaccgccatctttaccttcgctcagcataaattcacagtctaagtgcaaaacactacccgaactcgtacccatcgccgatgtgtctgatggtaaacatgatttaggattgaaacagcgtgtgatagccgaaaatgagttgtctggtaatagtgacttaaccccttcatcgatggcaagccccttttcacatacaaacacctcttctccctacctcagaaatgatctgagcaattcagtgggatctgacttttcaaatttgatatcggcatatgaacaaagttcaagtcccatcaagtcatcgtcccagcctaaatcatcttctgaatcgtacatagacttaaacagtgtacgagatgttgatcaattggatgaaaatggttggaaatatgcaaatttaaaagataggatcgagacattaggcattctaggagaaggagccggtggctctgtttccaagtgtaaattgaaaaatggatcaaaaatattcgctttaaaagtgataaacacattaaatacagatcccgagtatcagaagcaaatattcagagaattacagtttaataggagtttccaatccgaatatatcgtacgatattatggaatgtttacggatgacgaaaactcttcaatttatattgctatggagtacatgggtgggcgatcgttggatgctatttataaaaatttgttagagcgtggtggtaggatcagtgaaaaagtcctggggaagattgcagaagcggtactaagaggactatcatatttgcatgaaaaaaaagttattcatagagatattaagccccagaatattttactgaatgaaaatggtcaggtgaaactttgtgattttggggtcagtggagaagccgttaactcgctagccacaacattcacggggacgtcattctatatggctccagaaaggattcaaggtcaaccatacagtgtcacatctgatgtatggtcacttggattaacgattttggaagtggcgaacgggaaatttccatgctcttccgagaagatggcagccaatatagctccctttgaattgttaatgtggattttaacatttactcctgaattaaaggatgaacccgaatctaatatcatatggagtccatcattcaaatcctttatcgactactgtctgaaaaaagatagtcgtgaacggccatctccaagacaaatgatcaatcatccttggataaagggtcaaatgaaaaaaaatgtcaatatggaaaaattcgtgaggaagtgctggaaagattaa

SEQ ID NO: 212 - protein, 508 aa, Saccharomyces cerevisiae
MASLFRPPESAKCNPNSPRLKLPLLRNNQVDENNIYLTSNGSSTTAYSSHTPEPLTSSTSTLFSQTRLHPSDSSMTLNTMKKRPAPPSLPSLSINSQSKCKTLPELVPIADVSDGKHDLGLKQRVIAENELSGNSDLTPSSMASPFSHTNTSSPYLRNDLSNSVGSDFSNLISAYEQSSSPIKSSSQPKSSSESYIDLNSVRDVDQLDENGWKYANLKDRIETLGILGEGAGGSVSKCKLKNGSKIFALKVINTLNTDPEYQKQIFRELQFNRSFQSEYIVRYYGMFTDDENSSIYIAMEYMGGRSLDAIYKNLLERGGRISEKVLGKIAEAVLRGLSYLHEKKVIHRDIKPQNILLNENGQVKLCDFGVSGEAVNSLATTFTGTSFYMAPERIQGQPYSVTSDVWSLGLTILEVANGKFPCSSEKMAANIAPFELLMWILTFTPELKDEPESNIIWSPSFKSFIDYCLKKDSRERPSPRQMINHPWIKGQMKKNVNMEKFVRKCWKD

SEQ ID NO: 213 - DNA, 1521 bp, Saccharomyces cerevisiae
atggcttcaatgttcagaccaccagaatccaataggagtcaccaaaagactccaaaattaacgcttccagtaaatttagttcaaaatgcgaaatccactaatgatgggcaacatctcaaccggtcaccgtactcgtcagtgaacgaaagcccatactccaacaatagcacttcagctacttccactacgtcatccatggcttcaaattccactttgttgtacaatagatcatctactacaactattaaaaatagaccggtaccacctccattacctcccctagtactaacgcaaaaaaaagacggtatagaatatagagttgccggcgatagtcagctttctgaaagattttctaatttgcatgttgatataacttacaaggaactactatctagtgctccaatttccactaagttatccaacatagataccacttttatcaagaaagatctcgacacaccagaaggcgaggattcatacccctcgacacttctttctgcgtacgacttcagcagtagcgggagcaactccgcccctttaagtgcaaataacataatttcttgttccaacttaatacaaggaaaagacgtagaccagttagaggaagaagcatggaggtttgggcatctcaaggatgagattactacactaggaattctaggagaaggcgcgggtggttctgtagccaagtgccgattaaaaaatggaaaaaaggtttttgcgttgaagacaatcaacactatgaatactgacccagaatatcaaaagcaaatattcagagagctacaatttaataagagttttaagtccgattatattgtgcagtactatggtatgtttaccgacgaacagagttcttcaatatacattgccatggaatatatgggaggaaaatcactggaggcaacgtataaaaatttgttgaaacgtggcggtagaataagtgagagggtgataggaaagatagcagaatctgtcttaagaggtttatcatacttacacgaaaggaaagtcatccacagggacattaaaccccaaaacattcttcttaatgaaaaaggggaaatcaaattatgcgatttcggtgtcagtggggaggctgttaactctttagcgatgacatttactggaacgtcattttatatggccccagaacgaatacaaggccaaccatacagcgtaacctgtgatgtatggtccttaggattaactcttctggaggttgctggagggagatttccatttgaatctgacaaaataacgcaaaacgtggctcctatagaattattgacgatgatcctgacgttttctccccagttgaaagatgagccagaactagacatatcctggagcaagacatttagatcttttatcgactattgtttaaaaaaagatgccagagagaggccttctcccaggcaaatgttaaagcatccctggattgtagggcaaatgaaaaaaaaagtcaacatggaacggtttgtaaagaaatgctgggaaaaggaaaaggatgggatataa

SEQ ID NO: 214 - protein, 506 aa, Saccharomyces cerevisiae [sequence omitted]

SEQ ID NO: 215 - DNA, 1149 bp, Saccharomyces cerevisiae
atggcaagtaaccagcacataggagcttcaaacctaaatgagaatgaggctatattaaccaaccgcgttgctgagctggaaaggcgtatgtcgatgtttgagggtatatttcacgcgttaagtaaccgtctcgatcttcactttaaaaaatatgatgtagtggtaaactcccaacagcaacaaatcaacgaactgaccgcgtttttatcaacattgctgaatgaccaacaacgccacgctgaaattctcagtgaaaaattaagcggaacgttgcatggggtgtcagctacgtcaatatccttaagccaaactcttgacccacaaggcttcactgatggaactacggcaccaggagctcctaggaattatacttcagtgcctatgaataatgatcaaactgctcatccgcaaaatgaaggagctgttagtaatgaaacactttttgaggacattttgaatggaaattcacaagaaaatgataagagtcaacaacaaactaacagctcaaattctataagccaagaaaataatagcaccaacccttcagtggacactcggttcaacaagccgcaaaattataattccaatttagtcccatccttggaagagtattcagcaaatccacctaacaatgatggtggccaaagtcaaggactgtacataagcagcaactcttctcaatcacggcagtctcctaatctccagaaagtttctcctaaccatgaaaatgcggttgaatcaaatgcacaagagagcgtgccgacatttgaggaggaacagtatgagactaaaacaggattgaaacggaaacgaatagtctgcacaagacccttcgaatttatcaagtcaccacactctgtgatggaggtttggaaggagtatacagaaggtgttaacgggcagccttctataaggaaaatggaagctctttatcaaacggcatggaggcgagatccagcagtaaataaaagatattcgagaagaaaggttctttggaaagccattcaaactggccttaatcgtgggtattcattaaactatgttgttgaaatattagaaaactcaagatatgttaatgataaacagaaggttaaacaacctattggttggttatgccacagttctcatattccagagactttgaagtga

SEQ ID NO: 216 - protein, 382 aa, Saccharomyces cerevisiae
MASNQHIGASNLNENEAILTNRVAELERRMSMFEGIFHALSNRLDLHFKKYDVVVNSQQQQINELTAFLSTLLNDQQRHAEILSEKLSGTLHGVSATSISLSQTLDPQGFTDGTTAPGAPRNYTSVPMNNDQTAHPQNEGAVSNETLFEDILNGNSQENDKSQQQTNSSNSISQENNSTNPSVDTRFNKPQNYNSNLVPSLEEYSANPPNNDGGQSQGLYISSNSSQSRQSPNLQKVSPNHENAVESNAQESVPTFEEEQYETKTGLKRKRIVCTRPFEFIKSPHSVMEVWKEYTEGVNGQPSIRKMEALYQTAWRRDPAVNKRYSRRKVLWKAIQTGLNRGYSLNYVVEILENSRYVNDKQKVKQPIGWLCHSSHIPETLK

SEQ ID NO: 217 - DNA, 2115 bp, Saccharomyces cerevisiae
atgacggtcgaccatgatttcaatagcgaagatattttattccccatagaaagcatgagtagtatacaatacgtggagaataataacccaaataatattaacaacgatgttatcccgtattctctagatatcaaaaacactgtcttagatagtgcggatctcaatgacattcaaaatcaagaaacttcactgaatttggggcttcctccactatctttcgactctccactgcccgtaacggaaacgataccatccactaccgataacagcttgcatttgaaagctgatagcaacaaaaatcgcgatgcaagaactattgaaaatgatagtgaaattaagagtactaataatgctagtggctctggggcaaatcaatacacaactcttacttcaccttatcctatgaacgacattttgtacaacatgaacaatccgttacaatcaccgtcaccttcatcggtacctcaaaatccgactataaatcctcccataaatacagcaagtaacgaaactaatttatcgcctcaaacttcaaatggtaatgaaactcttatatctcctcgagcccaacaacatacgtccattaaagataatcgtctgtccttacctaatggtgctaattcgaatcttttcattgacactaacccaaacaatttgaacgaaaaactaagaaatcaattgaactcagatacaaattcatattctaactccatttctaattcaaactccaattctacgggtaatttaaattccagttattttaattcactgaacatagactccatgctagatgattacgtttctagtgatctcttattgaatgatgatgatgatgacactaatttatcacgccgaagatttagcgacgttataacaaaccaatttccgtcaatgacaaattcgaggaattctatttctcactctttggacctttggaaccatccgaaaattaatccaagcaatagaaatacaaatctcaatatcactactaattctacctcaagttccaatgcaagtccgaataccactactatgaacgcaaatgcagactcaaatattgctggcaacccgaaaaacaatgacgctaccatagacaatgagttgacacagattcttaacgaatataatatgaacttcaacgataatttgggcacatccacttctggcaagaacaaatctgcttgcccaagttcttttgatgccaatgctatgacaaagataaatccaagtcagcaattacagcaacagctaaaccgagttcaacacaagcagctcacctcgtcacataataacagtagcactaacatgaaatccttcaacagcgatctttattcaagaaggcaaagagcttctttacccataatcgatgattcactaagctacgacctggttaataagcaggatgaagaccccaagaacgatatgctgccgaattcaaatttgagttcatctcaacaatttatcaaaccgtctatgattctttcagacaatgcgtccgttattgcgaaagtggcgactacaggcttgagtaatgatatgccatttttgacagaggaaggtgaacaaaatgctaattctactccaaatttcgatctttccatcactcaaatgaatatggctccattatcgcctgcatcatcatcctccacgtctcttgcaacaaatcatttctatcaccatttcccacagcagggtcaccataccatgaactctaaaatcggttcttcccttcggaggcggaagtctgctgtgcctttgatgggtacggtgccgcttacaaatcaacaaaataatataagcagtagtagtgtcaactcaactggcaatggtgctggggttacgaaggaaagaaggccaagttacaggagaaaatcaatgacaccgtccagaagatcaagtgtcgtaatagaatcaacaaaggaactcgaggagaaaccgttccactgtcacatttgtcccaagagctttaagcgcagcgaacatttgaaaaggcatgtgagatctgttcactctaacgaacgaccatttgcttgtcacatatgcgataagaaatttagtagaagcgataatttgtcgcaacacatcaagactcataaaaaacatggagacatttaa

SEQ ID NO: 218 - protein, 704 aa, Saccharomyces cerevisiae
MTVDHDFNSEDILFPIESMSSIQYVENNNPNNINNDVIPYSLDIKNTVLDSADLNDIQNQETSLNLGLPPLSFDSPLPVTETIPSTTDNSLHLKADSNKNRDARTIENDSEIKSTNNASGSGANQYTTLTSPYPMNDILYNMNNPLQSPSPSSVPQNPTINPPINTASNETNLSPQTSNGNETLISPRAQQHTSIKDNRLSLPNGANSNLFIDTNPNNLNEKLRNQLNSDTNSYSNSISNSNSNSTGNLNSSYFNSLNIDSMLDDYVSSDLLLNDDDDDTNLSRRRFSDVITNQFPSMTNSRNSISHSLDLWNHPKINPSNRNTNLNITTNSTSSSNASPNTTTMNANADSNIAGNPKNNDATIDNELTQILNEYNMNFNDNLGTSTSGKNKSACPSSFDANAMTKINPSQQLQQQLNRVQHKQLTSSHNNSSTNMKSFNSDLYSRRQRASLPIIDDSLSYDLVNKQDEDPKNDMLPNSNLSSSQQFIKPSMILSDNASVIAKVATTGLSNDMPFLTEEGEQNANSTPNFDLSITQMNMAPLSPASSSSTSLATNHFYHHFPQQGHHTMNSKIGSSLRRRKSAVPLMGTVPLTNQQNNISSSSVNSTGNGAGVTKERRPSYRRKSMTPSRRSSVVIESTKELEEKPFHCHICPKSFKRSEHLKRHVRSVHSNERPFACHICDKKFSRSDNLSQHIKTHKKHGDI

SEQ ID NO: 219 - DNA, 1893 bp, Saccharomyces cerevisiae
atgctagtcttcggacctaatagtagtttcgttcgtcacgcaaacaagaaacaagaagattcgtctataatgaacgagccaaacggattgatggacccggtattgagcacaaccaacgtttctgctacttcttctaatgacaattctgcgaacaatagcatatcttcgccggaatatacctttggtcaattctcaatggattctccgcatagaacggacgccactaatactccaattttaacagcgacaactaatacgactgctaataatagtttaatgaatttaaaggataccgccagtttagctaccaactggaagtggaaaaattccaataacgcacagttcgtgaatgacggtgagaaacaaagcagtaatgctaatggtaagaaaaatggtggtgataagatatatagttcagtagccacccctcaagctttaaatgacgaattgaaaaacttggagcaactagaaaaggtattttctccaatgaatcctatcaatgacagtcattttaatgaaaatatagaattatcgccacaccaacatgcaacttctcccaagacaaaccttcttgaggcagaaccttcaatatattccaatttgtttctagatgctaggttaccaaacaacgccaacagtacaacaggattgaacgacaatgattataatctagacgataccaataatgataatactaatagcatgcaatcaatcttagaggattttgtatcttcagaagaagcattgaagttcatgccggacgctggtcgcgacgcaagaagatacagcgaggtggttacctcttcctttccttctatgacggattctagaaattcgatctctcattcgatagagttttggaatctcaatcacaaaaatagtagcaacagtaaacccactcaacaaattatccctgaaggtactgccactactgagaggcgtggatcaaccatttcacctactaccactataaacaactctaatccaaacttcaaattattagatcatgacgtttctcaagctctgagcggttatagtatggatttttctaaggactctggtataacaaagccaaaaagcatttcctcttctttaaatcgcatctcccatagcagtagcaccacaaggcaacagcgtgcctctttgcccttaattcatgatattgaatcttttgcaaatgattcggtgatggcaaatcctctgtctgattccgcatcatttctttcagaagaaaatgaagacgatgcttttggtgcgctaaattacaatagcttagatgcaaccacaatgtcggcattcgacaataacgtagaccccttcaacattctcaagtcatctccggctcaggatcaacagtttatcaaaccctctatgatgttgtcggataatgcctctgctgccgctaaattggcgacttctggtgttgataatatcacacctacaccagctttccaaagaagaagctatgatatctcgatgaactcttcgttcaaaatacttcctactagtcaagctcaccatgcagctcaacatcatcaacaacaacctactaaacaggcaacggtaagcccaaacacaagaagaagaaagtcgtcaagtgttactttaagtccaactatttctcataacaacaacaatggtaaggttcctgtccaacctcggaaaaggaaatctattactaccattgaccccaacaactacgataaaaataaacctttcaagtgtaaagactgtgagaaggcattcagacgcagtgagcacttgaaaaggcatataagatccgttcattcaacggaacgcccttttgcttgtatgttctgtgagaaaaaattcagtagaagtgacaatttatcacaacatctaaaaactcacaaaaagcacggtgatttttga

SEQ ID NO: 220 - protein, 630 aa, Saccharomyces cerevisiae
MLVFGPNSSFVRHANKKQEDSSIMNEPNGLMDPVLSTTNVSATSSNDNSANNSISSPEYTFGQFSMDSPHRTDATNTPILTATTNTTANNSLMNLKDTASLATNWKWKNSNNAQFVNDGEKQSSNANGKKNGGDKIYSSVATPQALNDELKNLEQLEKVFSPMNPINDSHFNENIELSPHQHATSPKTNLLEAEPSIYSNLFLDARLPNNANSTTGLNDNDYNLDDTNNDNTNSMQSILEDFVSSEEALKFMPDAGRDARRYSEVVTSSFPSMTDSRNSISHSIEFWNLNHKNSSNSKPTQQIIPEGTATTERRGSTISPTTTINNSNPNFKLLDHDVSQALSGYSMDFSKDSGITKPKSISSSLNRISHSSSTTRQQRASLPLIHDIESFANDSVMANPLSDSASFLSEENEDDAFGALNYNSLDATTMSAFDNNVDPFNILKSSPAQDQQFIKPSMMLSDNASAAAKLATSGVDNITPTPAFQRRSYDISMNSSFKILPTSQAHHAAQHHQQQPTKQATVSPNTRRRKSSSVTLSPTISHNNNNGKVPVQPRKRKSITTIDPNNYDKNKPFKCKDCEKAFRRSEHLKRHIRSVHSTERPFACMFCEKKFSRSDNLSQHLKTHKKHGDF

SEQ ID NO: 221 - DNA, 3675 bp, Saccharomyces cerevisiae
atggattccacaggcgcttctcagattgttagcgcactagatgttatttactcccccaagtctaacaattctcaacggcaagaagctcagaaatttttagatgaagtgaaattatgctcagaatcgcccttttggggctacgaaattgcattgcaaaaccccactaattctatattgaaatactttggactaggattactagaccatgcagtgaagaaaaactggaatgattatgacgaggggaaaagagtggccctgagaaaatgggtcatggaacttaattttggggtgcaagattatgataccagatatattaaggaaaaattagccactttatgggtagaggtggcaaaaagaacatggggtgaggctcttaagcagacaaaccctacggaagaacagttactcacatcttgggtggacatggacaataaccttttcgaactttggaacataaatcaatcgtcaagagaactagcattaataattttcagaatcctttttgaagatgttttcttgttggacgacctaattgttttgaaaaggatgacggttattcaacccttatgtgtaatgattgtttgccctattgaagttttcgcaataaaatacaaattcagtgataaatggaccaaatttaaagctaatgaagagggctggttttctgtttggattccagagttgaataatgcattacaacagaataattctgaatacatcataaggcttttagaaactctgaagacgtgtttaaactggccattaacagaggtcattgtaagaaatgacgtgttatcctccttattgacttgtttatccagcaatatcccaagggcgcagtcaatggcattagactcgatacatattctgttgacccgtccctatagtaatgaaagccattaccaaatgaccatagatcgagtttttgataatatggacttattagatagcgtttatgaaagcttgttgtttgatcctacagatgatatagatgaaacgaaatatcctataattaaaaagttcgtggatatgatcagttgtctctatgtttgtgtcccaaagattaaggagacaaatggccaaattcaaaaatattttaagcttgtattaaagacaacttataacccaagcttaatcgttagcggattaacattagacctatggtgtacctgtcttcgaaacgatgaatacttacccaagctggagaaatatgtcattcctgatctactacagtttgccgcggatgctttagtctattatgaacagattgatggtcatatttccaaaaaatttgcggagattgattttcaatccaagtccgaatttcaaacattttgttccacttataggaaaagaataagagacatcattaggttgatttcttgcgtcgaattagaccttacttatgattggttgaacaacagattaaacaattatttcagctctccatttggtcagcaggtcttaagttccacatttttggaccataaattagagccttatttaggtgccctctcccaatacatgattgttgaatgtttcatcaatggttgtataagatggaagatctggtatccaacaggagatgattatgacgaaaaactagattccatattacaaaaactggaaattttgtcaaaccagttaattgcattaaatttaagagaaccattgttattgaagaaacaaatccaaaattttgcactttttttgacaatgttaaaagataatgtgcttttcacacttttagaaaaaatcataacaagcgccacgatggactatccagaaattaatttggaagagagaggcgctgaatcagacgcagttagagatttgagatatgcttgtggtatcgagttgaataggatggctttattaatgcccgaatctctgaaaaaaatatacccagaccttgaaagtgtcattgccagaatcatgcccaacttatcttaccatgaaaaaatttccttcaaatccttcttattgatcattgtattgaagtcttcattagatatgaaagaggaaagatttgcggctattgtggatccagaacttttagcctggtctgataaaacaacagttgttggtctttctgatttgcattggtttatggaacgcttaggtattgttcagatcgcagaatatttccagaggcgtgatatcgacgaaaatagtgaccttttatcaattccaattgatgatgagggtaaagagctgaagtcggaattgaccaaacgttggcaaagcttgtttcctgttcgtgcaacaagaatgttcattcattattcaatgcaaagtataaagacagatgaagaattcaaaatgctacaagatctgtggagacctaggattgtcccaatattaccttacatcacgagactactgtaccaattgcaatcctaccacgatccagataattggaaaggattacctacggttgtgcaatccttcgtcaagtattccactattgaaagattttgggaggccggagcttcaaataaatcaaaggatgagtttattgatgaacatatgaaagcgatgcaaaccttacgagacttcgccgactccgtaggacacatcattaggtatacaagggaatacactctacttgttttaagtgccatatcatcacttggtagtgttttttaccttttggacgaatcgcccgacctactactgaactctattgccatatttaagccaggtagcaatgagataagccctggagtttcaacacatggatggaaacacataatgaatatagccattcgtcctatattaaaaggttgtccaaaagattgtctggggaaattcatgcccgcatttttgcctaaattatttgaaatcctggacctgctgctatgtcagaaatggtcctcgcatatgaatgatatggacatgaacccagttccaactgacgatgatcaaatgactgaagaaattttggaagagaatttgttgagacaactaaccacagttgttgttagaatagtaattgattgtgttggtcaaggcaatgccaatccaaacagtgctaaaagcaggctaaataaccatcaaatggagatgagaaaaattatatttaatgatttaaacacccttgctccatttttgaaacttttgaaccatttaatttccttcaaggatacaaaatgttcatttaactccatcctagtaatgaaatgctgcttaacctcagtccttaatcaaaacaacacggtggatgaatatttcacatttgaagtgatgaaaaatctgttgctaaatgtgctgtgtaatagtgcgtttaaggattctttccatgaggcactatatgctttcactgtgatttttttgactctgtgcaaagaatatccctctgctagagcgttcctttttgagatatctaatggttataatattgatgagttatacagaaatttaaggagcgtggacgaatacaaaacacaaagggcactcatgattgattttatagattgggttaaatccaccagtgggaaagaagatggtaatgtggaccatgcaggcgatgagagaaaaagacaagagaaaagggaagctatcctcaagaaggcaaatgagagattaattaagaagaataaagaaaacggagacatgctggatgatccgaacattgaagacggtgctgtgggtaatctctttgatgacaactga

SEQ ID NO: 222 - protein, 1224 aa, Saccharomyces cerevisiae
MDSTGASQIVSALDVIYSPKSNNSQRQEAQKFLDEVKLCSESPFWGYEIALQNPTNSILKYFGLGLLDHAVKKNWNDYDEGKRVALRKWVMELNFGVQDYDTRYIKEKLATLWVEVAKRTWGEALKQTNPTEEQLLTSWVDMDNNLFELWNINQSSRELALIIFRILFEDVFLLDDLIVLKRMTVIQPLCVMIVCPIEVFAIKYKFSDKWTKFKANEEGWFSVWIPELNNALQQNNSEYIIRLLETLKTCLNWPLTEVIVRNDVLSSLLTCLSSNIPRAQSMALDSIHILLTRPYSNESHYQMTIDRVFDNMDLLDSVYESLLFDPTDDIDETKYPIIKKFVDMISCLYVCVPKIKETNGQIQKYFKLVLKTTYNPSLIVSGLTLDLWCTCLRNDEYLPKLEKYVIPDLLQFAADALVYYEQIDGHISKKFAEIDFQSKSEFQTFCSTYRKRIRDIIRLISCVELDLTYDWLNNRLNNYFSSPFGQQVLSSTFLDHKLEPYLGALSQYMIVECFINGCIRWKIWYPTGDDYDEKLDSILQKLEILSNQLIALNLREPLLLKKQIQNFALFLTMLKDNVLFTLLEKIITSATMDYPEINLEERGAESDAVRDLRYACGIELNRMALLMPESLKKIYPDLESVIARIMPNLSYHEKISFKSFLLIIVLKSSLDMKEERFAAIVDPELLAWSDKTTVVGLSDLHWFMERLGIVQIAEYFQRRDIDENSDLLSIPIDDEGKELKSELTKRWQSLFPVRATRMFIHYSMQSIKTDEEFKMLQDLWRPRIVPILPYITRLLYQLQSYHDPDNWKGLPTVVQSFVKYSTIERFWEAGASNKSKDEFIDEHMKAMQTLRDFADSVGHIIRYTREYTLLVLSAISSLGSVFYLLDESPDLLLNSIAIFKPGSNEISPGVSTHGWKHIMNIAIRPILKGCPKDCLGKFMPAFLPKLFEILDLLLCQKWSSHMNDMDMNPVPTDDDQMTEEILEENLLRQLTTVVVRIVIDCVGQGNANPNSAKSRLNNHQMEMRKIIFNDLNTLAPFLKLLNHLISFKDTKCSFNSILVMKCCLTSVLNQNNTVDEYFTFEVMKNLLLNVLCNSAFKDSFHEALYAFTVIFLTLCKEYPSARAFLFEISNGYNIDELYRNLRSVDEYKTQRALMIDFIDWVKSTSGKEDGNVDHAGDERKRQEKREAILKKANERLIKKNKENGDMLDDPNIEDGAVGNLFDDN

SEQ ID NO: 223 - DNA, 2277 bp, Saccharomyces cerevisiae
atggataacacgaccaatattaatacaaatgagcgctctagtaacacggattttagctcagctcccaatatcaaaggtttgaatagccatactcagttgcagtttgatgcggattctcgagttttcgtttcggatgtaatggctaagaactctaagcaattattgtacgcccatatttataactatttaatcaaaaacaattactggaactctgccgcaaaatttttaagcgaagctgaccttcctttatctagaataaacggatctgcttcgggtgggaaaactagcttgaacgccagcctgaagcagggattaatggatattgcatctaagggtgacattgttagtgaagatgggctattaccttcgaaaatgctgatggacgctaatgacacgtttttactggaatggtgggaaatttttcaatcattgttcaatggagacctagaatctgggtaccaacaggatcataatcctttaagagagagaataataccaattttgccagctaattctaaatctaatatgccttcccatttctctaatctcccaccaaatgtgattccaccaactcaaaatagttttccagtttcagaggagagttttaggcccaatggtgacggaagtaactttaatttaaacgatccaaccaatcgaaacgtctccgaaagatttctatcgagaacttccggtgtctacgacaaacagaatagcgctaattttgcacctgatactgctataaacagtgatattgctgggcagcagtacgcaactataaatctacataaacacttcaatgatttgcaatcaccagcacagccccagcaatcatctcaacagcagatccagcagcctcagcatcaaccccagcatcaaccgcaacagcaacagcaacagcaacaacaacaacaacaacagcaacagcaacagcaacagcaacagcagcaacagcaacagcaacagcaacaacatcaacagcagcaacagacaccgtatcctattgtcaacccacaaatggtccctcatattccatcggaaaattctcattcaaccggacttatgccttcagtgcctcctacaaatcaacaatttaatgcacaaacccaatcttcaatgttttcagaccagcagcgcttctttcaatatcaattacaccaccaaaatcaaggacaggcgccatcttttcagcaaagccaatctggcaggtttgatgacatgaacgctatgaaaatgttttttcagcagcaagcactacagcaaaattcactacagcaaaatcttggaaatcaaaattatcaatctaatacacgtaacaatactgcggaagaaactacgcccacaaatgacaataacgcaaatggcaatagtttattgcaagaacacatacgagcccgcttcaataagatgaaaacaattcctcaacaaatgaaaaatcaaagcactgtcgcaaatccggttgttagtgatataacatctcaacagcagtacatgcatatgatgatgcaaagaatggcggctaaccagcaattacaaaatagtgcctttcctccagacactaatcgtatagcgccagctaacaacactatgccattacaaccaggaaatatggggtctcctgtcattgaaaatccaggtatgaggcagactaatccatccggacaaaaccctatgatcaatatgcagcccttatatcaaaatgtttcttccgcaatgcatgcgttcgctccgcaacaacaatttcatctaccacaacattataaaaccaatacttcagtaccacaaaatgattctacctccgtctttcctttgcctaacaataacaataacaataacaacaacaacaataataataataataataatagtaataatagtaataataataataataataataataataataataatagtaataatacacccacagtatcacaaccatcatcaaaatgtacttctagctccagcacaactcctaatataactacaacaattcaacccaagcggaaacagagagtgggtaaaacaaagaccaaggaatcaagaaaagttgctgcagctcagaaagttatgaaatctaagaaactggaacaaaatggtgattcagctgctacaaacttcatcaatgtcactccaaaggacagtggcggtaagggtaccgtaaaagttcaaaacagtaactcgcagcaacaactaaatggctctttttctatggatacagaaacattcgacatatttaacattggtgacttttctcctgatctaatggatagctaa

SEQ ID NO: 224 - protein, 758 aa, Saccharomyces cerevisiae
MDNTTNINTNERSSNTDFSSAPNIKGLNSHTQLQFDADSRVFVSDVMAKNSKQLLYAHIYNYLIKNNYWNSAAKFLSEADLPLSRINGSASGGKTSLNASLKQGLMDIASKGDIVSEDGLLPSKMLMDANDTFLLEWWEIFQSLFNGDLESGYQQDHNPLRERIIPILPANSKSNMPSHFSNLPPNVIPPTQNSFPVSEESFRPNGDGSNFNLNDPTNRNVSERFLSRTSGVYDKQNSANFAPDTAINSDIAGQQYATINLHKHFNDLQSPAQPQQSSQQQIQQPQHQPQHQPQQQQQQQQQQQQQQQQQQQQQQQQQQQQQQHQQQQQTPYPIVNPQMVPHIPSENSHSTGLMPSVPPTNQQFNAQTQSSMFSDQQRFFQYQLHHQNQGQAPSFQQSQSGRFDDMNAMKMFFQQQALQQNSLQQNLGNQNYQSNTRNNTAEETTPTNDNNANGNSLLQEHIRARFNKMKTIPQQMKNQSTVANPVVSDITSQQQYMHMMMQRMAANQQLQNSAFPPDTNRIAPANNTMPLQPGNMGSPVIENPGMRQTNPSGQNPMINMQPLYQNVSSAMHAFAPQQQFHLPQHYKTNTSVPQNDSTSVFPLPNNNNNNNNNNNNNNNNNSNNSNNNNNNNNNNNNSNNTPTVSQPSSKCTSSSSTTPNITTTIQPKRKQRVGKTKTKESRKVAAAQKVMKSKKLEQNGDSAATNFINVTPKDSGGKGTVKVQNSNSQQQLNGSFSMDTETFDIFNIGDFSPDLMDS

SEQ ID NO: 225 - DNA, 1302 bp, Saccharomyces cerevisiae
atgtttgtttcaccaccaccagcaacttcgaaaaaccaagttttacaacgacgtccattagaatcgactaacagtaatcatgggtttgcaagctccctacaggccattccggaaaacacgatgagtggcagtgataatgcttcttttcaaagtttgccactatcaatgagtagctctcaatccacgacttcttcgagaagagagaactttgtgaatgctcctccggagtacactgatagagctagagatgagattaaaaaaagattattggcctcctcacctagcagaaggtcacatcattcaagcagtatgcattcagcgagcaggagatcaagcgtggctgaaagtgggagtttactttcggataatgcctcgtcttatcaatcaagtatattttctgccccctctactgtgcacacgcaactaactaatgactcttcgttctccgaatttcctaaccacaagttaatcacgagagtgagcctggatgaagcattacccaaaacgttttatgacatgtattcgccagatattctattagcagacccatccaacattctctgtaacgggcgtcccaagtttaccaagagagagttattggattgggatttaaacgatataagatcgttattgatagtcgagaagttaaggcccgaatggggtaatcaactaccggaagtaataacggtgggtgataatatgccccagtttaggttacaattattaccactatattctagcgatgagaccataatcgcaacgttagtccattcggatctgtacatggaggctaacttagattatgaattcaaactaaccagcgccaaatatacagtagcgaccgctagaaaaagacatgagcatataactggtagaaatgaagccgtcatgaatttgtcgaaaccggaatggagaaatatcatcgaaaattacctcttaaatatagcagtagaggcacaatgcaggtttgatttcaaacaaagatgctccgaatataagaaatggaagttacaacagtccaacttaaaaagaccggacatgcccccaccaagcataataccgcggaaaaacagcacagaaacaaaatcgcttctgaaaaaggctttattgaagaacattcagttgaaaaaccccaataataaccttgatgaattgatgatgagatcaagcgccgcaacaaatcaacagggaaaaaacaaagtcagcttatctaaagaagaaaaggctacgatatggtcgcaatgtcaggcacaagtttaccaaagattaggattggattggcagccggattcagtatcctga

SEQ ID NO: 226 - protein, 433 aa, Saccharomyces cerevisiae
MFVSPPPATSKNQVLQRRPLESTNSNHGFASSLQAIPENTMSGSDNASFQSLPLSMSSSQSTTSSRRENFVNAPPEYTDRARDEIKKRLLASSPSRRSHHSSSMHSASRRSSVAESGSLLSDNASSYQSSIFSAPSTVHTQLTNDSSFSEFPNHKLITRVSLDEALPKTFYDMYSPDILLADPSNILCNGRPKFTKRELLDWDLNDIRSLLIVEKLRPEWGNQLPEVITVGDNMPQFRLQLLPLYSSDETIIATLVHSDLYMEANLDYEFKLTSAKYTVATARKRHEHITGRNEAVMNLSKPEWRNIIENYLLNIAVEAQCRFDFKQRCSEYKKWKLQQSNLKRPDMPPPSIIPRKNSTETKSLLKKALLKNIQLKNPNNNLDELMMRSSAATNQQGKNKVSLSKEEKATIWSQCQAQVYQRLGLDWQPDSVS

SEQ ID NO: 227 - DNA, 2373 bp, Saccharomyces cerevisiae
atgtcttcattaactcgattgctacaggaaaaacgaaaaaatgaaacttcgaactcatcaccgagaacttctgctgatacgttgaccacgacgcccgagtcacaatcgcttgaccttcactctaggaataagagtagtagtcatattggtagcgtgagtaatagcagcagtagtgatcgtaatagggctaacgtgccagttcctggcagtgtcacaactgttactcaaatatactcagaggaagattcatcatcaacagccggttcctctctcgacgataggaatcagttttcctccagcttccttaatgcaaactttgctcacactgcatcattctacggcacaagtgcacaaagtagagatagatttggatccttaataaacgatcaaggtactgcaggactttcctcacatggtggttcttttgctgcacagaacagaatcacaagtagattatctaccacgtcacatacttcaggaagggccattccttctttatcatcaagtataccttactccgtgccaaattctaacaaagataacaatagctcgaatagcaacagctcctctttgtcttcttcgtggctcgaaacatatgcaggcggtatgcccaataatatttctgcaatcgattcaaatgttatatcctccccaaaagtagatagcgtggaaccacgttttgttatctccaaacaaaaactccaaaaagcatcgatggatagtaataatgcaaatgccactcaatcaagatctatatcccgttcaggttcattctcttcacagcttgggaattttttcttttccaaaaactcaaaagaatcttcaaattctaactctgcaggcatgtctttttctgccaattccaatggtccttctccaaacattaagaatcccaatgttaccaatggttcgacgcctatcccgaagcctatccgcgcaagacaaagcagcatatattctgcatcaagacagccaactggttcctatactgataacttttacggttccccctcatctgtacatgaccacttacctccaagtcaaagtgttccaaggtcacaacattcttccatcggtgatttaaagaggttcttcaaaaaaagttctaacagtaacctttcctcgaatagtaacaacgtgatcccgaacggatcacctctttctagcggaattgccgttccgtcacactctcattcatcgtctcattttgccgcagggaataactcatattccactagttataacggaaatggagatactatttattctcatagtcacggcggttcaggaattccgttctcaaaaaggtacatcaaaaccggtgccgatttaggcgctggagcaggaggttctgtcaaattagctcaaagaatttcagataacaaaatatttgcagtgaaggagtttagaactaaatttgaaaatgaatccaaaagagattatgtcaagaaaattacatcagaatactgtattggtacaactttgaatcatcccaatatcattgaaacaattgaaatcgtgtatgaaaatgatagaattctccaagttatggaatattgtgaatacgatttatttgctattgtaatgagtaataaaatgtcctatgaagagatttgttgttgcttcaaacaaatacttactggtgtacaatatttgcatagtatcggcttagctcatagagatctaaagctagataattgtgttataaacgaaaaaggtattgtaaaattaatcgattttggtgctgctgtggtattttcatatccattctcaaaaaatcttgtggaagcaagtggaattgttggaagtgatccatatttagcacctgaagtctgtatatttgcgaagtatgacccacgtcccgtagatatttggtcttctgcaatcatttttgcatgtatgatactgaagaaatttccatggaaaattccgaaattaagggacaattcattcaaactattttgttccggacgtgattgcgactccttaagtagcttggttacaagaactcctgatccaccttcctacgatgaatcgcactcaacagaaaagaaaaaacccgaaagctcttccaataatgtatcagatcctaataatgttaatatcgggccacaaagattgttgcactcattaccagaagagactcagcatattgttggacgtatgattgatttggcgcccgcatgcagaggaaatatcgaagaaatcatggaagatccttggatccgtagcattgatatgtgccacttggttgaagatggattatcgttcaaagtggttagaggagaagaccatcatcacacacaagtggatcaaagtgaagcacatattgcaggcctagaaaagaaaaagaaaaagcaaaataatcaataa

SEQ ID NO: 228 - protein, 790 aa, Saccharomyces cerevisiae
MSSLTRLLQEKRKNETSNSSPRTSADTLTTTPESQSLDLHSRNKSSSHIGSVSNSSSSDRNRANVPVPGSVTTVTQIYSEEDSSSTAGSSLDDRNQFSSSFLNANFAHTASFYGTSAQSRDRFGSLINDQGTAGLSSHGGSFAAQNRITSRLSTTSHTSGRAIPSLSSSIPYSVPNSNKDNNSSNSNSSSLSSSWLETYAGGMPNNISAIDSNVISSPKVDSVEPRFVISKQKLQKASMDSNNANATQSRSISRSGSFSSQLGNFFFSKNSKESSNSNSAGMSFSANSNGPSPNIKNPNVTNGSTPIPKPIRARQSSIYSASRQPTGSYTDNFYGSPSSVHDHLPPSQSVPRSQHSSIGDLKRFFKKSSNSNLSSNSNNVIPNGSPLSSGIAVPSHSHSSSHFAAGNNSYSTSYNGNGDTIYSHSHGGSGIPFSKRYIKTGADLGAGAGGSVKLAQRISDNKIFAVKEFRTKFENESKRDYVKKITSEYCIGTTLNHPNIIETIEIVYENDRILQVMEYCEYDLFAIVMSNKMSYEEICCCFKQILTGVQYLHSIGLAHRDLKLDNCVINEKGIVKLIDFGAAVVFSYPFSKNLVEASGIVGSDPYLAPEVCIFAKYDPRPVDIWSSAIIFACMILKKFPWKIPKLRDNSFKLFCSGRDCDSLSSLVTRTPDPPSYDESHSTEKKKPESSSNNVSDPNNVNIGPQRLLHSLPEETQHIVGRMIDLAPACRGNIEEIMEDPWIRSIDMCHLVEDGLSFKVVRGEDHHHTQVDQSEAHIAGLEKKKKKQNNQ

SEQ ID NO: 229 - DNA, 897 bp, Penicillium chrysogenum
atggcgaccacattgactgacgataagcgacctcaattgcagcctgtttgccagaattgcggcacctctaccacccccctgtggcgtagggacgaactcggttcagtcctttgcaacgcatgtggactcttcttgaaactgcatggccgacctcgtccgataagcttgaaaacagatgtgatcaaaagtcgcaatcgcgtgaagaccggccaaggccctaagcgcaagtcaggcggccctgttgataccaatggtatcccgccacgatctgaggctgggacccctccccttgggtcgcatggataccgtcgcgcgtcgcgcaagatgtcctcgggtcattcggatcgctccaactcccccgtttcccggaccgagacacctggatttggctcgatgaacgcgcacaactcgaacatcgcgccgcagcacatgtttgacagcgttaccctgggtgacagcatgaactcttccagcggcctcccctcccgccagatgcgccaaccttctccctcggcagtcgaccgccaactcgattccccccacacattcgaaagtctcctggccctcaacacatcccttaagacacgcgtcagtgaactcgagttcgtcaacgagctcttccgcggtcgcgttacggaactcgaacaaagtgacgctagcgcccgtcgatcggagatgattgtacgagactccgaggttcgtctgagacggtctctcgaggatgctcagcgtcgcgaggaggatctcaagcgtcgtgttagcgatctcgaacgccagcttggttctggcagcgccggcgacgccgagtccggcgagccactcgcaaaaaagatccggctgtcggatgttgtggaatctggcgaggatgtgcaggtcaaatctcccaagagcgtttag

SEQ ID NO: 230 - protein, 298 aa, Pencillium chrysogenum
MATTLTDDKRPQLQPVCQNCGTSTTPLWRRDELGSVLCNACGLFLKLHGRPRPISLKTDVIKSRNRVKTGQGPKRKSGGPVDTNGIPPRSEAGTPPLGSHGYRRASRKMSSGHSDRSNSPVSRTETPGFGSMNAHNSNIAPQHMFDSVTLGDSMNSSSGLPSRQMRQPSPSAVDRQLDSPHTFESLLALNTSLKTRVSELEFVNELFRGRVTELEQSDASARRSEMIVRDSEVRLRRSLEDAQRREEDLKRRVSDLERQLGSGSAGDAESGEPLAKKIRLSDVVESGEDVQVKSPKSV

SEQ ID NO: 231 - DNA, 696 bp, Saccharomyces cerevisiae
atgttttacccatataactatagtaacctcaatgtttctactatgcccgcactgccgggaatctccgcatttgatggaatgcaagatgaagaaaacgttgaaataagcccggaaagaaaatatcagacgctactaccagttctaactaattctcatgtggtagagaatgaactaaaacacaaattaaataagactgcttttgatttccgataccaaaccaaatcagaaaatggctctgaaaagtgggagccaaaatacttaataacgcctaatttacaaacaagaagcgtctcttttgacaattcatcggtacaatataattcagattcatccgaaaaaagctcgctatcacaactaacttgtaattcatcaataatacaacagcctgagaacggaatagtttctaatgatgcatataataagatggcaaatagtagatactctctgaaaacgcggaagcaaagaacagatccaagaaatacgttatcagatgaggaagaccttgaacaaaggcgcaaatacatttgcaaaatttgcgcaagaggattcactacatcgggtcatttagcaaggcataatagaattcatacgggcgaaaaaaatcattgttgtccgtataagggatgcacgcagcgattcagtcgacatgataattgcttgcaacactatagaacacatttgaaaaagggacaataa

SEQ ID NO: 232 - protein, 231 aa, Saccharomyces cerevisiae
MFYPYNYSNLNVSTMPALPGISAFDGMQDEENVEISPERKYQTLLPVLTNSHVVENELKHKLNKTAFDFRYQTKSENGSEKWEPKYLITPNLQTRSVSFDNSSVQYNSDSSEKSSLSQLTCNSSIIQQPENGIVSNDAYNKMANSRYSLKTRKQRTDPRNTLSDEEDLEQRRKYICKICARGFTTSGHLARHNRIHTGEKNHCCPYKGCTQRFSRHDNCLQHYRTHLKKGQ

SEQ ID NO: 233 - DNA, 3189 bp, Saccharomyces cerevisiae
atggtcgaaaatagtacgcagaaggccccacatgccggaaatgatgataatagctctaccaagccatattcggaggcgtttttcttagggttcaataacccaacgcctggattagaagctgagcactcaagcacatcgcctgcccccgagaactccgaaacacataataggaaaagaaatagaatattgtttgtctgccaggcttgttggaagtcaaaaacaaagtgtgatagagaaaaacctgaatgtggtcgatgcgtcaagcatgggttaaaatgtgtttatgacgtatcaaaacagccagcaccacgaattccgagtaaagacgccattatatcaaggttggaaaaagatatgttttattggaaagataaagctatgaagctactaacagagagagaggtgaatgaatcaggcaagagatcagcaagtccgatcaatacaaacaatgctagcggggacagtcctgataccaagaagcagcataaaatggaacctatatatgaacaaagtggtaacggggatataaacaatggtaccagaaatgatattgaaatcaacttgtatagaagtcatccaaccatgatcatgagtaaagtcatgaaaagagaagttaagccgttatctgaaaattatattataattcaggactgttttctaaaaatcctggtcacttcagtgttccttgacacttcaaagaacacgatgataccggcattgacggcaaacgcgaatattacaagagcccagcctagcgtagcaaataaccttttgaaattgaaggaaatgctaatcagacagtgtcaaaccgaagatgaaaaaaatcgtgtaaacgaattcactgatagaatactacaaaatacaaattcaaatagaaacttgaaaatcggtatgctattatcaatgctttacaattctgtcggttaccaatatctggaggatcattgccctcaaggtggcgaatattcggatttattgagaaatttgatcaatgaatgtgaagctattttgccatcttacgaaattattgaacgctacaagaaccacttttatgagtacgtttatccaagtctacctttcatcgaattagaaatttttgaagaatcattaagtcaaacaatttttccggacccaaacaacccctccaaggtgcaaatacgtatgggtagcacacatttgagagctaaggtggaaaacttgagtcttctattggttatcttgaaactctcatacatgtcaataaggtttttagatcatagtacagcagactcgagtttttatctttcaaaggaaataattgataaatacccaataccgaacgattttattttattgagtccaagatgtctagcatcggaaaattggtgtgcatgcgctaatgaaaacatcatatcatgtttactatatatctggtctttttttgctttttctcctgaagagggtgatttctttctcgagcaccccaccgatgttatcagtagtttgataatgatgctttccacctcgattggtctccacagagatccttcagatttccctcaattgatttccccgtccacctcagataaaagaaccttgaatcacagaagaatactctggttgagtatcgttaccgtttgttcgtttgaagcaagtctcaaaggtagacattctgtctcaccgatatctttaatggccttattcctaaatattaaggatcctgattctctgacggtatatatgaaccgagttaggggcgatctaagcgatatcaataatcacacacttttgagaattcataaatttacattcaagagagcccagcttgcgttactcctgtcggacttagataacttgacgatgacatactatggtagtttccatttgcattcaattgaattcataagagaaaagattgagatttttgtggaggaaaactttcccatagtaccattaaaaagtgtcgcacaggataagtcagaccttgatgacatgaatgtgatttcagaaatgaatatattatcttcagaaaattcttcttcatttcacaatcgaataatgaataaactattgatgttgagaacttcaatggccgtattcttgcattttgaaacacttatcactaaggataaaagtatcttcccattctacaagaaatactttatggttagctgtatggatgcgttgtcactaataaattatttcaataagtttttcaacggagaatatcgacacgcaatatcttctttaaccagttttaatgttacaaaatttattcagttagcactatccagcacaatcttcagcctattagggattatactaagaataggtttagccatccatatgttatcttctgaagtacaaaagttatcgggaacgacagatccaagaataaaggagttaaataccaaagtcgaaaaatttagtaccctgcaaagagatctcgagtctgctttagaaggtatatattgctctgcttcggaacatttaagattcacatacttccccgtttttaagatgttggctttattcgatgtcattgtacaaaggatgagaaagggtgaattatggcacggcatatttacgatgattcaaatggaacaaatgcattctaggataatcaagacattaagcattaccttaggagtcaaactggacaaaaaggataggctattagaggaattgatggcatgcaatcacgttgcgaattttagcgttgaagatatagatgagctgaaccgtaatatcaaaaaagagattcaaatttcttcaggattgaagccgcctgtaaacacaattgacttaaccaacggcgaaccattcggaaatgctgttcctaccttcacaaagacatggagttcatccttagataatttagaaaaactatcatcggccgctgcagttggtcagagcttggactacaacagtggtttacgtcagggtcctttggcgggtggtggttcaaaagagcaaacgccaatagccgggatgaataacttgaacaattcaatcaatgctacaccaattgtcgataactcatctggatcacaacttcctaatggtttcgatagaggccaagcgaataatactccttttccaggttattttggaggtttggatttatttgattatgactttttggtttgggcaatgactttgcttaaaaattttctttccaaactcctacctattcatttcatcaattaa

SEQ ID NO: 234 - protein, 1062 aa, Saccharomyces cerevisiae
MVENSTQKAPHAGNDDNSSTKPYSEAFFLGFNNPTPGLEAEHSSTSPAPENSETHNRKRNRILFVCQACWKSKTKCDREKPECGRCVKHGLKCVYDVSKQPAPRIPSKDAIISRLEKDMFYWKDKAMKLLTEREVNESGKRSASPINTNNASGDSPDTKKQHKMEPIYEQSGNGDINNGTRNDIEINLYRSHPTMIMSKVMKREVKPLSENYIIIQDCFLKILVTSVFLDTSKNTMIPALTANANITRAQPSVANNLLKLKEMLIRQCQTEDEKNRVNEFTDRILQNTNSNRNLKIGMLLSMLYNSVGYQYLEDHCPQGGEYSDLLRNLINECEAILPSYEIIERYKNHFYEYVYPSLPFIELEIFEESLSQTIFPDPNNPSKVQIRMGSTHLRAKVENLSLLLVILKLSYMSIRFLDHSTADSSFYLSKEIIDKYPIPNDFILLSPRCLASENWCACANENIISCLLYIWSFFAFSPEEGDFFLEHPTDVISSLIMMLSTSIGLHRDPSDFPQLISPSTSDKRTLNHRRILWLSIVTVCSFEASLKGRHSVSPISLMALFLNIKDPDSLTVYMNRVRGDLSDINNHTLLRIHKFTFKRAQLALLLSDLDNLTMTYYGSFHLHSIEFIREKIEIFVEENFPIVPLKSVAQDKSDLDDMNVISEMNILSSENSSSFHNRIMNKLLMLRTSMAVFLHFETLITKDKSIFPFYKKYFMVSCMDALSLINYFNKFFNGEYRHAISSLTSFNVTKFIQLALSSTIFSLLGIILRIGLAIHMLSSEVQKLSGTTDPRIKELNTKVEKFSTLQRDLESALEGIYCSASEHLRFTYFPVFKMLALFDVIVQRMRKGELWHGIFTMIQMEQMHSRIIKTLSITLGVKLDKKDRLLEELMACNHVANFSVEDIDELNRNIKKEIQISSGLKPPVNTIDLTNGEPFGNAVPTFTKTWSSSLDNLEKLSSAAAVGQSLDYNSGLRQGPLAGGGSKEQTPIAGMNNLNNSINATPIVDNSSGSQLPNGFDRGQANNTPFPGYFGGLDLFDYDFLVWAMTLLKNFLSKLLPIHFIN

SEQ ID NO: 235 - DNA, 1932 bp, Penicillium chrysogenum
atgacggagaaccacaccccttctactacgcagccgacgttgcctgcgcctgttgctgaagccgcgccgatccaagcaaacccggctccttctgcctcagtcacggcgactgctgccgccgctactgcggcggtgaacaacgccccctctatgaacggcgccggtgagcagttgccttgccagtgggttggttgcacggagaagtcccccactgccgagtctctatatgagcatgtttgcgagcgtcatgttggacgtaaaagcaccaacaacctcaacctgacctgccagtggggcacttgcaacaccacaacagtcaagcgtgatcatatcacctcccacatccgcgttcatgtgccacttaagccgcacaaatgcgacttttgtggtaaggctttcaagcgcccccaggatttgaagaagcatgtcaagactcatgcggacgactccgagatccgctcccccgaaccgggcatgaagcaccctgatatgatgttcccccaaaaccctaggggttcccctgctgccacacattacttcgaaagccctatcaacggcatcaatgggcaatattcacatgcaccgcctccccagtactaccagccacaccccccaccccaggctcccaacccgcattcctacggcaatctatactatgccctgagccaaggacaagagggaggccacccctacgaccgtaagcgcggatatgacgcgttgaacgaattttttggcgacttgaagcgccgccagttcgaccctaattcctatgccgcggtcggccagcgtctgctgggtctccaggcccttcagcttcccttcctcagtggccctgcccccgaataccagcaaatgcctgcgcctgttgccgttggcggcggcggtggtggttatggcggtggtgctccccagcctcctggttaccacctgccccccatgtccaatgttcggactaagaacgatttgatcaacattgatcagttcctcgaacaaatgcagaacactatctacgagagcgatgagaatgtggctgctgccggtgttgcccagcccggcgcgcattacgtgcacggtggcatgaatcatcgcaccacccactctcccccaacccactcccgccaagccacgttactgcaactaccttcagcccccatggcggctgctacagcgcactccccatcggtcggcaccccagccctgaccccaccttccagcgcacagtcgtatacctccaaccgctctcccatctccctgcacagctcacgcgtgtcgccccctcacgaggaggcggcgccgggtatgtaccctcgcttgcctgcggccatctgcgccgacagcatgactgcaggctatccgaccgcctcaggtgccgcaccaccctctactctgagcggtgcgtatgaccacgatgaccgccgccgctacactggtggtaccttgcaacgcgcccggccggccgagcgtgctgccaccgaggaccgcatggacatctcccaggatagcaaacatgatggcgagcgcactcccaaggctatgcacatctcggcgagcctgattgaccccgctctgtcgggtacctcatctgaccccgagcaggagtcagccaagcgtactgcggcaacggccactgaagtcgctgagcgggatgtcaacgttgcctgggttgaaaaggtccgtctgcttgagaacctccgccgcttggtttccggattgcttgaggccggtagccttactcctgaatatggagtgcagacatcctcggcttcgcctacgccaggacttgatgctatggagggagttgagactgccagtgtacgtgctgcttctgagcaggccagggaagagcccaagtctgaaagtgagggagtcttctatcccacgttacgtggtgtggatgaggatgaggatggagactctaaaatgcccgagtaa

SEQ ID NO: 236 - protein, 643 aa, Penicillium chrysogenum
MTENHTPSTTQPTLPAPVAEAAPIQANPAPSASVTATAAAATAAVNNAPSMNGAGEQLPCQWVGCTEKSPTAESLYEHVCERHVGRKSTNNLNLTCQWGTCNTTTVKRDHITSHIRVHVPLKPHKCDFCGKAFKRPQDLKKHVKTHADDSEIRSPEPGMKHPDMMFPQNPRGSPAATHYFESPINGINGQYSHAPPPQYYQPHPPPQAPNPHSYGNLYYALSQGQEGGHPYDRKRGYDALNEFFGDLKRRQFDPNSYAAVGQRLLGLQALQLPFLSGPAPEYQQMPAPVAVGGGGGGYGGGAPQPPGYHLPPMSNVRTKNDLINIDQFLEQMQNTIYESDENVAAAGVAQPGAHYVHGGMNHRTTHSPPTHSRQATLLQLPSAPMAAATAHSPSVGTPALTPPSSAQSYTSNRSPISLHSSRVSPPHEEAAPGMYPRLPAAICADSMTAGYPTASGAAPPSTLSGAYDHDDRRRYTGGTLQRARPAERAATEDRMDISQDSKHDGERTPKAMHISASLIDPALSGTSSDPEQESAKRTAATATEVAERDVNVAWVEKVRLLENLRRLVSGLLEAGSLTPEYGVQTSSASPTPGLDAMEGVETASVRAASEQAREEPKSESEGVFYPTLRGVDEDEDGDSKMPE

SEQ ID NO: 237 - DNA, 2007 bp, Saccharomyces cerevisiae
atggaagacaagtttgctaacctcagtctccatgagaaaactggtaagtcatctatccaattaaacgagcaaacaggctcagataatggctctgctgtcaagagaacatcttcgacgtcctcgcactacaataacatcaacgctgaccttcatgctcgtgtaaaagcttttcaagaacaacgtgcattgaaaaggtctgccagcgtgggcagtaatcaaagcgagcaagacaaaggcagttcacaatcacctaaacatattcagcagattgttaataagccattgccgcctcttcccgtagcaggaagttctaaggtttcacaaagaatgagtagccaagtcgtgcaagcgtcctccaagagcactcttaagaacgttctggacaatcaagaaacacaaaacattaccgacgtaaatattaacatcgatacaaccaaaattaccgccacaacaattggtgtaaatactggcctacctgctactgacattacgccgtcagtttctaatactgcatcagcaacacataaggcgcaattgctgaatcctaacagaagggcaccaagaaggccgctttctacccagcaccctacaagaccaaatgttgccccgcataaggcccctgctataatcaacacaccaaaacaaagtttaagtgcccgtcgagcggtcaaattaccaccaggaggaatgtcattaaaaatgcccactaaaacagctcaacagccgcagcagtttgccccaagcccttcaaacaaaaaacatatagaaaccttatcaaacagcaaagttgttgaagggaaaagatcgaatccgggttctttgataaatggtgtgcaaagcacatccacctcatcaagtaccgaaggcccacatgacactgtaggcactacacccagaactggaaacagcaacaactcttcaaattctggtagtagtggtggtggtggtcttttcgcaaatttctcgaaatacgtggatatcaaatccggctctttgaattttgcaggcaaactatcgctatcctctaaaggaatagatttcagcaatggttctagttcgagaattacattggacgaactagaatttttggatgaactgggtcatggtaactatggtaacgtctcaaaggtactgcataagcccacaaatgttattatggcgacgaaggaagtccgtttggagctagatgaggctaaatttagacaaattttaatggaactagaagttttgcataaatgcaattctccctatattgtggatttttatggtgcattctttattgagggcgccgtctacatgtgtatggaatacatggatggtggttccttggataaaatatacgacgaatcatctgaaatcggcggcattgatgaacctcagctagcgtttattgccaatgctgtcattcatggactaaaagaactcaaagagcagcataatatcatacacagagatgtcaaaccaacaaatattttatgttcagccaaccaaggcaccgtaaagctgtgcgatttcggtgtttctggtaatttggtggcatctttagcgaagactaatattggttgtcagtcatacatggcacctgaacgaatcaaatcgttgaatccagatagagccacctataccgtacagtcagacatctggtctttaggtttaagcattctggaaatggcactaggtagatatccgtatccaccagaaacatacgacaacattttctctcaattgagcgctattgttgatgggccgccaccgagattaccttcagataaattcagttctgacgcacaagattttgtttctttatgtctacaaaagattccggaaagaagacctacatacgcagctttaacagagcatccttggttagtaaaatacagaaaccaggatgtccacatgagtgagtatatcactgaacgattagaaaggcgcaacaaaatcttacgggaacgtggtgagaatggtttatctaaaaatgtaccggcattacatatgggtggtttatag

SEQ ID NO: 238 - protein, 668 aa, Saccharomyces cerevisiae
MEDKFANLSLHEKTGKSSIQLNEQTGSDNGSAVKRTSSTSSHYNNINADLHARVKAFQEQRALKRSASVGSNQSEQDKGSSQSPKHIQQIVNKPLPPLPVAGSSKVSQRMSSQVVQASSKSTLKNVLDNQETQNITDVNINIDTTKITATTIGVNTGLPATDITPSVSNTASATHKAQLLNPNRRAPRRPLSTQHPTRPNVAPHKAPAIINTPKQSLSARRAVKLPPGGMSLKMPTKTAQQPQQFAPSPSNKKHIETLSNSKVVEGKRSNPGSLINGVQSTSTSSSTEGPHDTVGTTPRTGNSNNSSNSGSSGGGGLFANFSKYVDIKSGSLNFAGKLSLSSKGIDFSNGSSSRITLDELEFLDELGHGNYGNVSKVLHKPTNVIMATKEVRLELDEAKFRQILMELEVLHKCNSPYIVDFYGAFFIEGAVYMCMEYMDGGSLDKIYDESSEIGGIDEPQLAFIANAVIHGLKELKEQHNIIHRDVKPTNILCSANQGTVKLCDFGVSGNLVASLAKTNIGCQSYMAPERIKSLNPDRATYTVQSDIWSLGLSILEMALGRYPYPPETYDNIFSQLSAIVDGPPPRLPSDKFSSDAQDFVSLCLQKIPERRPTYAALTEHPWLVKYRNQDVHMSEYITERLERRNKILRERGENGLSKNVPALHMGGL

SEQ ID NO: 239 - DNA, 1581 bp, Saccharomyces cerevisiae
atgtccaccctttttctgattggaatacacgagattgagaaatctcaaacaattgtacagaatgaacactattttgatagagtgattgagcttcaagatttggattctctgatggtagcattgtataaggacagagtttcgccttttccaaacgtccataactttgaaacgggcgtatctatagttctttatgacccttcaaaatttcaattatctgtgcgacaattggatgttctattcaagcgatttttcccatctttcaatatttctgcgatagatcatacacgagaggaaaacctgcaacgtcttgaatgtgttgagcgtgaaaatagcatctgtcgtaatagaataacgagaattaaccactggatgtatcaccatcatgatgatactccagacggtattaacaaaaacagctatggtactgtaaatgggaattctgtccccactcaagcatgtgaagcaaacatttacactttattattgcatttgaatgattccaaggcacaacatttacgaaaggcatcagtgccaaggctaattcgcaacatcgagtttatgtcttttttgtcagatccaatagaaaaaatttctcaagagggatcacattattggaacattctatcaacttgggacttttgtgctttatcattaagcactcaagaattgatttggtgcgggttcacgcttatcaaaaagttatctaaggatgcaaaagtactcattgcagataataagttactgctactactatttactttagaatcatcctatcatcaagttaacaaatttcacaattttaggcatgccatcgatgtcatgcaagccacatggcgattgtgtacatatcttcttaaagataatcctgtacaaacattactgttgtgtatggctgccataggtcatgatgtcggtcatcctgggactaacaatcaactattgtgcaactgtgaatcagaggttgctcaaaatttcaaaaatgtctctatcttggagaattttcacagggaattatttcaacaattgctatcagagcattggcctcaattgctatctatctccaaaaaaaaatttgattttatttccgaggctattctggccacagatatggcattgcattctcagtatgaggatagattaatgcatgaaaacccaatgaaacaaatcactttgatatctctaattattaaagctgcagacatctctaatgtgacgagaaccttgtcaatatcagcacgttgggcatacctcattactctcgaatttaatgattgcgctcttttggaaacatttcataaagctcaccgcccagaacaagactgttttggcgattcatacaagaatgttgattctccgaaagaagatttggaatcaattcaaaatattttggtgaacgtaacagaccctgatgatattatcaaagaccatccgcatattccaaacggtcaaatatttttcattaatacgtttgctgaagtatttttcaacgcattaagtcaaaaattctcaggattaaaatttttaagcgataatgtcaaaatcaataaagaatactggatgaaacacaagaaaccacaatag

SEQ ID NO: 240 - protein, 526 aa, Saccharomyces cerevisiae
MSTLFLIGIHEIEKSQTIVQNEHYFDRVIELQDLDSLMVALYKDRVSPFPNVHNFETGVSIVLYDPSKFQLSVRQLDVLFKRFFPSFNISAIDHTREENLQRLECVERENSICRNRITRINHWMYHHHDDTPDGINKNSYGTVNGNSVPTQACEANIYTLLLHLNDSKAQHLRKASVPRLIRNIEFMSFLSDPIEKISQEGSHYWNILSTWDFCALSLSTQELIWCGFTLIKKLSKDAKVLIADNKLLLLLFTLESSYHQVNKFHNFRHAIDVMQATWRLCTYLLKDNPVQTLLLCMAAIGHDVGHPGTNNQLLCNCESEVAQNFKNVSILENFHRELFQQLLSEHWPQLLSISKKKFDFISEAILATDMALHSQYEDRLMHENPMKQITLISLIIKAADISNVTRTLSISARWAYLITLEFNDCALLETFHKAHRPEQDCFGDSYKNVDSPKEDLESIQNILVNVTDPDDIIKDHPHIPNGQIFFINTFAEVFFNALSQKFSGLKFLSDNVKINKEYWMKHKKPQ

SEQ ID NO: 241 - DNA, 3207 bp, Saccharomyces cerevisiae
atgcgaggcttgacacctaagaacggtgtacatattgagacgggtccggatacagaatcgtccgcggactccagcaacttttctacaggtttcagcggcaagattcgtaagccaaggtcgaaagtaagtaaagcgtgcgataactgtagaaaaagaaagataaaatgtaatgggaagtttccctgcgcaagctgtgagatatattcatgtgagtgcacgttcagcactagacaaggtggcgctcgaataaaaaaccttcacaagacgagtttggaaggtacaaccgtacaagtcaaagaggaaacagattccagttcgacttctttttctaatcctcagcgatgtacagacgggccatgcgcagtggaacaaccaacgaaattttttgagaatttcaagctaggtggtcgtagtagtggtgataatagcggaagtgatgggaagaatgacgacgatgtgaatagaaacggtttttatgaagacgatagcgaatcacaggcaactttgacatctctacaaaccactctgaaaaatttgaaggagatggctcatttaggtacacatgtaacctcagccatcgagagcattgaacttcagataagtgacttgcttaagcgatgggaacccaaagtgaggaccaaagaattagcaacaacgaaattttaccctaataaatcaatagaaactcaattgatgaaaaacaaatactgtgatgtggtacatttgacaagatatgccgcttggtcaaacaataagaaggaccaagatacttctagtcaacctttgatcgacgaaatctttggtttgtactctcctttccaatttttgtcacttcaaggtattggtaaatgtttccaaaattatagatccaaatccaaatgcgagatttttcccaggaccgccaaggaaaccatatacatcatgttaaggtttttcgacgtttgttttcatcacatcaaccaaggctgtgtctccatagctaatcccctggaaaactacctacagaaaatgaatcttttaccttcaaccccatcttcgatatcatctgcagggagcccgaatacagcacacacaaaatcgcatgttgcgttagtgataaatcacttaccgcagccctttgtgagaaatataaccggaataagtaattctgagctactaagcgaaatgaataatgatatcagcatgtttggcattttattgaagatgttggatatgcataaaaattcctaccagaacttcctaatggaaatcacatctaacccctccgtggctaaaaacacgcagtcaattgatgtcttgcaggaattcatccattattgtcaagctggagaggcgctaatcgccttatgttacagctattataattctacattatacaactacgtggacttcacatgcgacataacgcatttagagcaacttctatactttttggatctgctattttggctatcggaaatatacggttttgaaaaagtcttgaacgtagcagttcattttgtttcaagagttggtttatcaaggtgggaattttacgtgggtcttgatgaaaactttgctgaaagaagaagaaatctctggtggaaagctttctatttcgagaaaactttagcctctaaacttggctatccttcgaacattgatgactccaaaatcaattgtttattacctaagaattttcgagatgttgggttcttggataatagagattttatcgagaacgtccacttagttcgcaggagcgaagcttttgacaacatgtgcatatccgacttaaaatactatggcgaattagctgtcttacaaatagtcagccatttctcatcatctgttttattcaatgaaaaattcacgtcaattaggaatacatcaaaaccatctgttgttagagagaaactactcttcgaggtactcgagatttttaacgaaacagaaatgaaatatgatgctatcaaagagcaaactggaaaattgttcgatattgcattctctaaagatagtactgaactcaaagtttcaagagaggataagattatggcttcaaaatttgttctattttacgagcaccatttctgcagaatggttaacgaatctgataatattgtcgccagattatgcgtgcacagaaggccctcaatactaattgaaaacttgaaaatataccttcacaagatttacaaatcatggaccgatatgaacaaaatcttattagactttgacaacgattattccgtataccgttcgttcgcccattattctatcagttgcattattttggtatcacaagcattctcagtggccgaattcattaaagtaaatgacgttgtgaatatgattagagtcttcaaaagatttttggatataaaaattttttccgaaaatgagaccaatgagcatgtcttcaacagccaaagctttaaagactatacaagagctttttctttcctgacaatcgtcactcgtatcatgcttttggcatacggagagtcctctagcaccaacctcgatgttatctccaaatatattgatgagaatgcgccagatttaaaaggtataatagaacttgtcttggatacaaactcttgcgcttatcgatttttattagaacctgttcagaagtcaggattccatttaacggtctcacaaatgttgaaaaatagaaagtttcaggaaccactaatgtcaaatgaagataataagcagatgaagcataattcgggaaaaaatttgaatccggatctcccaagtcttaagacgggcacttcatgcttactaaatggcattgaatcgcctcaattgccattcaatggtcgctcagcaccttccccagtgagaaacaactcactaccggagtttgcacaattgccttcatttaggtcattatccgtgtctgatatgatcaatcccgattacgcgcaaccaacaaatgggcaaaataatacgcaagtccaatctaataaaccaatcaatgctcagcagcaaatacccacttcagtacaagtaccatttatgaacacaaatgaaatcaataacaacaacaacaacaacaacaacaataaaaacaatattaacaatattaacaacaacaacagtaacaatttttctgcaactagttttaatttggggacactagatgaatttgttaataacggtgatcttgaggacctctacagtatcctgtggagcgacgtttatccagatagttaa

SEQ ID NO: 242 - protein, 1068 aa, Saccharomyces cerevisiae
MRGLTPKNGVHIETGPDTESSADSSNFSTGFSGKIRKPRSKVSKACDNCRKRKIKCNGKFPCASCEIYSCECTFSTRQGGARIKNLHKTSLEGTTVQVKEETDSSSTSFSNPQRCTDGPCAVEQPTKFFENFKLGGRSSGDNSGSDGKNDDDVNRNGFYEDDSESQATLTSLQTTLKNLKEMAHLGTHVTSAIESIELQISDLLKRWEPKVRTKELATTKFYPNKSIETQLMKNKYCDVVHLTRYAAWSNNKKDQDTSSQPLIDEIFGLYSPFQFLSLQGIGKCFQNYRSKSKCEIFPRTAKETIYIMLRFFDVCFHHINQGCVSIANPLENYLQKMNLLPSTPSSISSAGSPNTAHTKSHVALVINHLPQPFVRNITGISNSELLSEMNNDISMFGILLKMLDMHKNSYQNFLMEITSNPSVAKNTQSIDVLQEFIHYCQAGEALIALCYSYYNSTLYNYVDFTCDITHLEQLLYFLDLLFWLSEIYGFEKVLNVAVHFVSRVGLSRWEFYVGLDENFAERRRNLWWKAFYFEKTLASKLGYPSNIDDSKINCLLPKNFRDVGFLDNRDFIENVHLVRRSEAFDNMCISDLKYYGELAVLQIVSHFSSSVLFNEKFTSIRNTSKPSVVREKLLFEVLEIFNETEMKYDAIKEQTGKLFDIAFSKDSTELKVSREDKIMASKFVLFYEHHFCRMVNESDNIVARLCVHRRPSILIENLKIYLHKIYKSWTDMNKILLDFDNDYSVYRSFAHYSISCIILVSQAFSVAEFIKVNDVVNMIRVFKRFLDIKIFSENETNEHVFNSQSFKDYTRAFSFLTIVTRIMLLAYGESSSTNLDVISKYIDENAPDLKGIIELVLDTNSCAYRFLLEPVQKSGFHLTVSQMLKNRKFQEPLMSNEDNKQMKHNSGKNLNPDLPSLKTGTSCLLNGIESPQLPFNGRSAPSPVRNNSLPEFAQLPSFRSLSVSDMINPDYAQPTNGQNNTQVQSNKPINAQQQIPTSVQVPFMNTNEINNNNNNNNNNKNNINNINNNNSNNFSATSFNLGTLDEFVNNGDLEDLYSILWSDVYPDS

SEQ ID NO: 243 - DNA, 4695 bp, Saccharomyces cerevisiae
atgttgcaagcgccctcaagttcaaactcgggtttgaatcaaggaaatgctgcgccggacggcccacctaacgaaacacagccgtacgaaggcctcgacgcggcagctcaagaagaaataaaagaattggcaagaacgctgacgagccaatcttcccttttatcgcaagaaaagcgtattaccggcactggcgacccgaatacactaactgctgcttcttcatcgtcattgagccggtcaattttcgctagtgatatcaagggagttaacccaatccttttggacgtcaatgatccagactacgatgagacattggatcctcgatcagaaaatttctcgagtgtcagatgggtacgaaatatggcacaaatatgcgagaatgattcggatttctataaaccgttttcattaggttgcgcctggaaagatttgagtgcctccggtgattctgccgatataacatatcagggaacatttggtaatatgcccatcaaatacttgaaaatgagttggaggtgcatatcccgacgtcttttccaccggacacatggcaagagtgaagataatgactccggtttccaaattttgaagccgatggacggatgcatcaatccgggggaactacttgttgtgcttggacgacccggtgcaggatgtactacgctgctgaaatctatatctgtaaatacacacggattcaagatttctccggacacaatcatcacgtacaatggattctccaacaaagagatcaaaaaccattaccgtggtgaagtggtctacaatgcagaatcagacattcacatcccgcacttgacagtattccaaactttatacacagtggcaagactgaagacaccaaggaaccgaatcaagggtgtcgatagggacacatttgccaaacacatgactgaagtggcaatggcaacttacggactgagccacactgcagatacaaaagtgggtaatgattttgttcgtggtgtatccgggggagaaaggaaaagagtttccattgctgaagtgtctatatgtggctcgaagtttcagtgctgggataatgccacgaggggcttagattctgctaccgcgctggagttcatcaaggccttgaaaacgcaagccactatcacaaagtctgcagccactgtggccatttaccaatgttctaaagatgcctatgatttgttcgataaagtctgtgttctttacgatggttaccaaatcttctttggcccaagtaagcaggccaaaaagtactttcaaagaatgggatatgtgtgtcccgaaaggcagaccacagcagattatttgacctctattactagtccttctgaaagaattaaggacaaagacatggtcaaacatggaattatgatcccacaaacggcctatgaaatgaaccagtactggattcaatcagaggaatacaaacaattacaggtgcaggtgaacaaacatttagatacagactcttcccagcaaagagaacaaataaaaaatgcacatattgccaaacaatctaagagagcacggccctcctctccttatacagtaagtttctttttgcaagttaagtatattctaatcagggatatatggaggattaagaatgacccaagtattcaacttttcacggttttgagtcatgcagcaatggctcttatcttgggatcaatgttttatgaagtcatgctttccactaccacaacaaccttttattaccgaggcgcggctattttttttgctattctgttcaatgcgttctcatcacttttagagatcttttcactctatgagacgaggcccattaccgaaaagcacaagacttactcgttatatcgcccaagtgctgatgccttcgcctctacattttctgatgttccaacaaaattagccacggcagtaactttcaacataccatattattttttaatcaatctaaaaagagatgccggtgcttttttcttttactttttaataaacattataacagtttttgctatgtcgcatttgttcagatgcattggctcagtgtcgaaaactttacctcaggcaatggttcccgcatctgttcttctgttagcttttgcaatgtacactgggtttgccatcccaagagtccaaatgcttggctggtcaaaatggatttcttatatcaacccattgtcttacctttttgaatcgctaatgattaacgaatttcatggtagaaatttcccatgtgctcagtatatacctagtgggccaaattatgtcaacgcaacaggtgacgaagtcacctgctccgccctcggttctatcccaggaaataattatgtaagtggtgatgatttcattcaaacgaactacggctatcgacataagaacaaatggcggtctgttggtattggtttagcatacattatttttttcttatttctgtatttattcttttgtgaatacaatgaaggagcaaagcaaaatggtgagatgttagtatttccccatagtgtggttaaaaagatgaagaagaagggtattgtctctgagaagaaaaagaaaaaccaaccaacgttgtcaacatctgatgctgagaaagatgtagagatgaacaacaattcaagtgcgactgattcaagatttttacgcgattctgatgcagctataatgggtaacgataaaactgtcgccaaggagcattattcatctccttcatcttctgcgtctcaaagcaatagttttagtaaaagtgatgacattgaattgtccaaatcacaagcgatttttcattggaaaaacttatgctacgatatcccgattaagaatgggaagaggagaattttggataatgttgatggttgggtcaagcctggtacactaactgccttgattggcgcatctggtgcaggaaaaacaacgttattagattgtcttgccgagagaaccacgatgggtttaatcactggtgatgtattcgtagatggtagaccgcgggaccagtctttccccagatcaattggttattgtcagcagcaggatttgcatttgaaaaccgcaactgtgagagagtcattaaggttttccgcgtacctgcgtcaagccgatgatgtatccatcgaggagaaagataaatacgttgaagaagtcattgaggtattggagatgaaactttatgctgatgccatagtaggcgttcctggtgaaggtttaaatgtggaacaaagaaaaaggttaaccataggtgtggagttagctgccaaaccaaaactgttggtatttttagatgagcccacgtctgggcttgattcccaaactgcatggtcaacttgtcaattaatgaagaaattggctagtcgcggacaagcaattttatgtaccattcatcaaccttctgctctcttaatgcaagagtttgataggttactatttttgcaagagggcggacaaactgtatattttggagagctagggaaaggttgcaaaacaatgattaactatttcgaagctcatggtgcccataaatgcccaccagatgccaatccagccgaatggatgttagaaatagtaggtgctgcaccaggaactcacgctagtcaagattattttgccatttggagagattctgaagaatatagggaaatgcagaaagagttggactggatggaacgagaattgcctaaacggacggaaggttcgtcaaatgaggagcagaaggagttcgctacgtcaactttgtaccagatcaaattggtgagttatcgattattccatcaatattggagaacaccattttacttatggtcaaaatttttttcaacaattgtgtctgaactcttcataggcttcacttttttcaaggcgaatacatcattacagggcctacagaatcaaatgctggccatttttatgtttacagtggtattcaacccaatattgcaacaatatttaccacttttcgttcagcagagggaactttatgaagctagagaaaggccatcaagaaccttttcgtggaaagcatttattgtatcgcagattctcgtggaaatcccttggaatttactggccggtactatagcttttttcgtctattattatcctgttggattttacagaaatgcttcttatgcaaatcaacttcatgaacgaggagctttattttggttatttgcgtgcgcgttttacgtctacatcagttcaatgggggtattagtgatttcatgcattgaaattgcagaaaatgctgcgaatctcgcttcacttttctttataatgtcattatctttctgcggtgttctggctacgccaaatattctaccaagattctggatttttatgtatagagtatcgccactgacatacctcattgatgctctgctatcggtaggactggccaatgctagtgtcgtttgttccagcaacgaacttttaaaaattgttcctccaagcggtatgacatgctcggaatatatggaaccttatatgcaatccaccgggacgggttatctgctcgatgggagttccgaaactgaatgtcacttttgtcaattcagttctaccaatgattatctggcgactgtgagttcttcgtattcacgtagatggatgaactatggcatttttagtgcatatattgtctttgactattgtgcagcaatatttttatactggctggtgcgggttccaaagaaaagcaaaaaattaaagaaataa

SEQ ID NO: 244 - protein, 1564 aa, Saccharomyces cerevisiae
MLQAPSSSNSGLNQGNAAPDGPPNETQPYEGLDAAAQEEIKELARTLTSQSSLLSQEKRITGTGDPNTLTAASSSSLSRSIFASDIKGVNPILLDVNDPDYDETLDPRSENFSSVRWVRNMAQICENDSDFYKPFSLGCAWKDLSASGDSADITYQGTFGNMPIKYLKMSWRCISRRLFHRTHGKSEDNDSGFQILKPMDGCINPGELLVVLGRPGAGCTTLLKSISVNTHGFKISPDTIITYNGFSNKEIKNHYRGEVVYNAESDIHIPHLTVFQTLYTVARLKTPRNRIKGVDRDTFAKHMTEVAMATYGLSHTADTKVGNDFVRGVSGGERKRVSIAEVSICGSKFQCWDNATRGLDSATALEFIKALKTQATITKSAATVAIYQCSKDAYDLFDKVCVLYDGYQIFFGPSKQAKKYFQRMGYVCPERQTTADYLTSITSPSERIKDKDMVKHGIMIPQTAYEMNQYWIQSEEYKQLQVQVNKHLDTDSSQQREQIKNAHIAKQSKRARPSSPYTVSFFLQVKYILIRDIWRIKNDPSIQLFTVLSHAAMALILGSMFYEVMLSTTTTTFYYRGAAIFFAILFNAFSSLLEIFSLYETRPITEKHKTYSLYRPSADAFASTFSDVPTKLATAVTFNIPYYFLINLKRDAGAFFFYFLINIITVFAMSHLFRCIGSVSKTLPQAMVPASVLLLAFAMYTGFAIPRVQMLGWSKWISYINPLSYLFESLMINEFHGRNFPCAQYIPSGPNYVNATGDEVTCSALGSIPGNNYVSGDDFIQTNYGYRHKNKWRSVGIGLAYIIFFLFLYLFFCEYNEGAKQNGEMLVFPHSVVKKMKKKGIVSEKKKKNQPTLSTSDAEKDVEMNNNSSATDSRFLRDSDAAIMGNDKTVAKEHYSSPSSSASQSNSFSKSDDIELSKSQAIFHWKNLCYDIPIKNGKRRILDNVDGWVKPGTLTALIGASGAGKTTLLDCLAERTTMGLITGDVFVDGRPRDQSFPRSIGYCQQQDLHLKTATVRESLRFSAYLRQADDVSIEEKDKYVEEVIEVLEMKLYADAIVGVPGEGLNVEQRKRLTIGVELAAKPKLLVFLDEPTSGLDSQTAWSTCQLMKKLASRGQAILCTIHQPSALLMQEFDRLLFLQEGGQTVYFGELGKGCKTMINYFEAHGAHKCPPDANPAEWMLEIVGAAPGTHASQDYFAIWRDSEEYREMQKELDWMERELPKRTEGSSNEEQKEFATSTLYQIKLVSYRLFHQYWRTPFYLWSKFFSTIVSELFIGFTFFKANTSLQGLQNQMLAIFMFTVVFNPILQQYLPLFVQQRELYEARERPSRTFSWKAFIVSQILVEIPWNLLAGTIAFFVYYYPVGFYRNASYANQLHERGALFWLFACAFYVYISSMGVLVISCIEIAENAANLASLFFIMSLSFCGVLATPNILPRFWIFMYRVSPLTYLIDALLSVGLANASVVCSSNELLKIVPPSGMTCSEYMEPYMQSTGTGYLLDGSSETECHFCQFSSTNDYLATVSSSYSRRWMNYGIFSAYIVFDYCAAIFLYWLVRVPKKSKKLKK

SEQ ID NO: 245 - DNA, 1719 bp, Saccharomyces cerevisiae
atgaagtacatggtagtcagctcgcctatacaagaggttttaagattacataaatatattgagatctctactaccacaatcacagttaaaattacaaataagatgtcctctccagtgattggtatcacctttggtaacacctcttcttctattgcctacatcaacccaaagaacgatgttgatgtcattgccaacccagatggtgagcgtgccattccatccgctttatcctatgtcggtgaagatgaataccacggtggtcaagctttgcaacaattaatcagaaatcctaagaatactatcattaacttccgtgacttcattggtttgccatttgacaagtgtgatgtcagcaagtgcgctaacggtgccccagctgtcgaagttgatggcaaagttggatttgttatttcaagaggcgaaggtaaggaagaaaaacttactgtagatgaagtggtctccagacatttaaacagattaaagttagccgcggaagattacatcggttctgccgtaaaggaagctgtattgacagttccaacaaacttcagtgaagaacaaaagactgcactaaaggcttctgccgccaaaattggtctgcaaattgttcaattcatcaatgaaccttctgctgctttattagcccacgctgaacaattcccatttgaaaaagatgttaacgttgttgttgctgacttcggtggtattagatctgacgctgctgtcattgccgttcgtaacggtattttcactattttggccactgctcatgacctcagcttaggtggtgacaatttggatactgaattagtcgaatattttgctagtgagttccaaaagaagtatcaagccaatccaagaaagaacgctagatccttggccaagttaaaggctaactcttcaattaccaagaagactttgtccaacgcaacttctgccactatttccatcgattccttagctgatggtttcgactatcacgcttctatcaacagaatgaggtacgaattggtagctaacaaggtcttcgcccaattttcctctttcgttgattctgtcattgccaaggctgaattagacccattggacatcgatgctgttcttttgactggtggtgtatcatttactccaaaattaaccactaacttggaatacactttaccagaatcagtcgaaattcttggtccacagaacaagaacgcttctaacaatccaaacgaattagctgcatccggtgccgcattacaagcaagattgattagcgattacgatgctgacgaattggctgaagctttacaaccagttatcgtcaatactccacatttaaagaagcctattggtttgattggtgctaagggcgaattccacccagtattgttggctgaaacttcgttccctgtacaaaagaaattgactttgaaacaagccaagggtgatttcttgattggtgtttacgaaggtgaccatcacatcgaggaaaagactttggagccaattccaaaagaagaaaatgctgaagaggacgatgaaagtgaatggtccgacgatgaacctgaagtcgtcagagaaaaactatacactttgggtaccaagttgatggaattgggaattaaaaacgctaacggtgttgaaattatctttaacattaacaaagacggtgctttaagagtcaccgctagagatttgaaaactggtaatgctgtaaagggtgaattatag

SEQ ID NO: 246 - protein, 572 aa, Saccharomyces cerevisiae
MKYMVVSSPIQEVLRLHKYIEISTTTITVKITNKMSSPVIGITFGNTSSSIAYINPKNDVDVIANPDGERAIPSALSYVGEDEYHGGQALQQLIRNPKNTIINFRDFIGLPFDKCDVSKCANGAPAVEVDGKVGFVISRGEGKEEKLTVDEVVSRHLNRLKLAAEDYIGSAVKEAVLTVPTNFSEEQKTALKASAAKIGLQIVQFINEPSAALLAHAEQFPFEKDVNVVVADFGGIRSDAAVIAVRNGIFTILATAHDLSLGGDNLDTELVEYFASEFQKKYQANPRKNARSLAKLKANSSITKKTLSNATSATISIDSLADGFDYHASINRMRYELVANKVFAQFSSFVDSVIAKAELDPLDIDAVLLTGGVSFTPKLTTNLEYTLPESVEILGPQNKNASNNPNELAASGAALQARLISDYDADELAEALQPVIVNTPHLKKPIGLIGAKGEFHPVLLAETSFPVQKKLTLKQAKGDFLIGVYEGDHHIEEKTLEPIPKEENAEEDDESEWSDDEPEVVREKLYTLGTKLMELGIKNANGVEIIFNINKDGALRVTARDLKTGNAVKGEL

SEQ ID NO: 247 - DNA, 2931 bp, Saccharomyces cerevisiae
atgaaagtgaagaaatcaactagatcaaaagtttcgacagcatgtgtcaattgcagaaaaaggaaaatcaaatgcacaggtaaatatccatgtaccaactgcatttcttacgattgtacgtgtgtattcctaaaaaaacatttaccgcagaaggaggatagttcccagtctttgcctactacagctgttgctccaccctcttcccacgccaatgtagaggcttcagcagatgtacagcatctggacactgcgattaagctagataatcaatattacttcaaactgatgaacgacctgatacagactccagtctctccgagtgcgacgcatgctcctgatacttccaataatcctactaatgataataatattctctttaaagatgattccaaatatcaaaatcaactggttacgtatcaaaatattctgacaaatttgtacgctctgccgccttgtgatgacactcagctcttgattgataaaacgaagtcgcagttgaataacctgattaacagttggaatcccgaaataaactaccccaagctttccagtttctctcctcgcccacaaagatcgatagaaacgtatcttttaaccaacaagtatagaaataaaatacacatgacgaggttctccttttggacagaccaaatggttaaatcacaaagtccagattcatttctagccaccactccactagtagatgaagtatttggtcttttctctccaatacaggctttttcactaagaggtataggatatttaattaaaaaaaatatcgaaaacacgggttcatcgatgttaatagatacaaaggaaactatttatctaatattaagattgtttgatttgtgttatgaacatttgatccaaggttgcatctctatttctaatccattagagaactatcttcaaaaaataaagcaaactcctactacgacggcatctgctagtttgcctacttccccagcacctttatctaacgatttagtcatttctgttattcatcaactacctcagccatttatacaatcgattaccgggtttacgactactcaattgatagaaaatttacatgattcattttcgatgtttcgaatagttactcaaatgtatgctcaacataggaagcgctttgcggaatttttaaaccaagctttctccttgccccatcaagaaaagagtgttttattctcgtcattctgctcatcagaatatcttctatctactctttgttacgcatactacaatgttaccctatatcacatgttggacataaacactttagattacctagagattttagtgtcattgctagaaatccaaaatgaaattgatgagcgttttggatttgaaaaaatgctagaagttgcggttacatgctccactaagatgggattgtctcgttgggagtattatgttggaatagacgaaaatactgccgaacggagaagaaaaatatggtggaaaatatacagtctggaaaagcgttttttaactgatcttggtgatttatccttaataaatgaacatcaaatgaattgtctcttgccgaaggatttcagggacatgggattcattaaccataaagaatttttaacgaaaattggtacgtcctctttatcaccgtcatcgcccaagctaaaaaacttgtcattgtccaggcttattgaatatggtgagttagcgatagcccaaattgttggagattttttttcagagactctttataatgagaaattcacgtctttagaagtatccgttaaacccacaattatcagacaaaagttattggagaaagtttttgaggacattgaatcttttaggttaaaattggccaaaataaagcttcacacctcaagagtttttcaagtagctcactgcaaatatccagaatatccaaaaaacgatctaattgaagcagctaaatttgtaagttaccataaaaatacatggttctccatcttgggtgctgttaacaatcttattgctaggctatctgaagatccagaggtgataactgagcaaagcatgaaatatgcgaatgaaatgtttcaagaatggagggaaattaatcaattcttaatacaggttgatactgattttattgtttgggcatgtttggacttttatgaactgatatttttcgtgatggcttcaaaattttatgtggaagacccgcacatcactttagaggatgttatcaacactttgaaagtttttaagagaataactaacattatttctttttttaataataatttggacgagaaggattatgattgtcaaactttcagggagttttcgagaagttcgagtttggttgccatatccataagaatcatatttttaaaatactgctatgccgaacaaattgatagagccgaattcatcgaacgtttgaaagaagttgaaccgggtctaagtgaccttttgcgtgagttttttgatacccgctcttttatttacaggtacatgttgaaatccgttgaaaaatcaggctttcatttaataattagaaaaatgttagaaagcgactataaatttttgtatagagacaaattggccactggtaatattccagaccaaggaaattcaagccaaatttctcagttgtatgacagtactgctccttcatacaacaatgcttctgcctcagcagcaaactcaccgttgaagttatcgtctttgttgaactctggagaggaatcgtacactcaagacgcatcagaaaatgttccatgtaatctgcggcatcaagatcgatcgttacaacagacaaaaagacaacattctgcgcctagccaaataagcgctaatgagaataatatatacaacttgggtactttagaggagtttgtcagcagtggtgacctgactgatttatatcatactctgtggaatgacaatacttcatatcccttcttatga

SEQ ID NO: 248 - protein, 976 aa, Saccharomyces cerevisiae
MKVKKSTRSKVSTACVNCRKRKIKCTGKYPCTNCISYDCTCVFLKKHLPQKEDSSQSLPTTAVAPPSSHANVEASADVQHLDTAIKLDNQYYFKLMNDLIQTPVSPSATHAPDTSNNPTNDNNILFKDDSKYQNQLVTYQNILTNLYALPPCDDTQLLIDKTKSQLNNLINSWNPEINYPKLSSFSPRPQRSIETYLLTNKYRNKIHMTRFSFWTDQMVKSQSPDSFLATTPLVDEVFGLFSPIQAFSLRGIGYLIKKNIENTGSSMLIDTKETIYLILRLFDLCYEHLIQGCISISNPLENYLQKIKQTPTTTASASLPTSPAPLSNDLVISVIHQLPQPFIQSITGFTTTQLIENLHDSFSMFRIVTQMYAQHRKRFAEFLNQAFSLPHQEKSVLFSSFCSSEYLLSTLCYAYYNVTLYHMLDINTLDYLEILVSLLEIQNEIDERFGFEKMLEVAVTCSTKMGLSRWEYYVGIDENTAERRRKIWWKIYSLEKRFLTDLGDLSLINEHQMNCLLPKDFRDMGFINHKEFLTKIGTSSLSPSSPKLKNLSLSRLIEYGELAIAQIVGDFFSETLYNEKFTSLEVSVKPTIIRQKLLEKVFEDIESFRLKLAKIKLHTSRVFQVAHCKYPEYPKNDLIEAAKFVSYHKNTWFSILGAVNNLIARLSEDPEVITEQSMKYANEMFQEWREINQFLIQVDTDFIVWACLDFYELIFFVMASKFYVEDPHITLEDVINTLKVFKRITNIISFFNNNLDEKDYDCQTFREFSRSSSLVAISIRIIFLKYCYAEQIDRAEFIERLKEVEPGLSDLLREFFDTRSFIYRYMLKSVEKSGFHLIIRKMLESDYKFLYRDKLATGNIPDQGNSSQISQLYDSTAPSYNNASASAANSPLKLSSLLNSGEESYTQDASENVPCNLRHQDRSLQQTKRQHSAPSQISANENNIYNLGTLEEFVSSGDLTDLYHTLWNDNTSYPFL

SEQ ID NO: 249 - DNA, 4536 bp, Saccharomyces cerevisiae
atgcccgaggccaagcttaacaataacgtcaacgacgttactagctactcctccgcgtcttcttctactgaaaacgctgctgatctacacaattataatgggttcgatgagcatacagaagctcgaatccaaaaactggcaaggactctgaccgcacagagtatgcaaaactccactcaatcggcacccaacaaaagtgatgctcagtctatattttctagcggtgtggaaggtgtaaacccgatattctctgatcctgaagctccaggctatgacccaaaattggaccccaactccgaaaatttttctagtgccgcctgggttaagaatatggctcacctaagtgcggcagaccctgacttttataagccttattccttaggttgcgcttggaagaacttaagtgcttctggtgcttccgcagatgtcgcctatcagtcaactgtggttaatattccatacaaaatcctaaaaagtgggctgagaaagtttcaacgttctaaagaaaccaatactttccaaatcttgaaaccaatggatggttgcctaaacccaggtgaattgctagtcgttttaggtagaccaggctctggctgtactactttattaaaatccatctcttcaaatactcatggttttgatcttggtgcagatactaaaatttcttacagcggctactcaggtgatgatattaagaaacattttcgtggtgaagttgtttacaacgcagaagctgatgtacatctgcctcatttaacagtcttcgaaactttggttacagtagcgaggttgaaaaccccacagaaccgtatcaagggtgtcgatagggaaagttatgcgaatcatttggcggaagtagcaatggcaacgtacggtttatcgcatacaaggaatacaaaagttggtaacgacatcgtcagaggtgtttccggtggtgaaaggaagcgtgtctccattgctgaagtctccatctgtggatccaaatttcaatgctgggataatgctacaaggggtttggattccgctaccgctttggaatttattcgtgccttaaagactcaagctgatatttccaatacatctgccacagtggccatctatcaatgttctcaagatgcgtacgacttgttcaataaagtctgtgttttggatgatggttatcagatctactatggccccgccgataaggccaagaagtactttgaagatatggggtatgtttgtccaagcagacaaaccaccgcagattttttgacctcagttacaagtccctctgagagaaccctgaacaaagatatgctaaaaaaaggtattcatataccacagaccccgaaggaaatgaacgattactgggtaaaatctccaaattacaaagagctaatgaaagaagtcgaccaacgattattgaatgacgatgaagcaagccgtgaagctattaaggaagcccacattgctaagcagtccaagagagcaagaccttcctctccttatactgtcagctacatgatgcaagttaaatacctattaatcagaaatatgtggagactgcgaaataatatcgggtttacattatttatgattttgggtaactgtagtatggctttaatcttgggttcaatgtttttcaagatcatgaaaaagggtgatacttctacattctatttccgtggttctgctatgttttttgcaattctattcaatgcattttcttctctgttagaaatcttttcgttatatgaggccagaccaatcactgaaaaacatagaacatattcgttataccatccaagtgctgacgcttttgcatcagttctatcagaaataccctcaaagttaatcatcgctgtttgcttcaatataatcttctatttcttagtagactttagaagaaatggtggtgtattctttttctacttattaataaacattgtcgcggttttctccatgtctcacttgtttagatgtgttggttccttaacaaagacattgtcagaagctatggttcccgcttctatgttattgttggctctatccatgtataccggttttgctattcctaagaagaagatcctacgttggtctaaatggatttggtatatcaatccgttggcttacttattcgaatctttgttaattaacgagtttcatggtataaaattcccctgcgctgaatatgttcctcgtggtcctgcgtatgcaaacatttctagtacagaatctgtttgtaccgtggttggagctgttccaggccaagactatgttctgggtgatgatttcattagaggaacttatcaatactaccacaaagacaaatggcgtggtttcggtattggtatggcttatgtcgtcttctttttctttgtctatctattcttatgtgaatacaacgagggtgctaaacaaaaaggtgaaatattagttttcccacgcagtatagttaaaagaatgaagaaaagaggtgtactaactgaaaagaatgcaaatgaccccgaaaacgttggggaacgtagtgacttatccagcgataggaaaatgctacaagaaagctctgaagaggaatccgatacttacggagaaattggtttatccaagtcagaggctatatttcactggagaaacctttgttacgaagttcagattaaggccgaaacaagacgtattttgaacaatgttgatggttgggttaaaccaggtactttaacagctttaatgggtgcttcaggtgctggtaaaaccacacttctggattgtttggccgaaagggttaccatgggtgttataactggtgatatcttggtcaatggtattccccgtgataaatctttcccaagatccattggttattgtcagcaacaagatttgcatttgaaaactgccactgtgagggagtcattgagattttctgcttacctacgtcaaccagctgaagtttccattgaagaaaagaacagatatgttgaagaagttattaaaattcttgaaatggaaaaatatgctgatgctgttgttggtgttgctggtgaaggtttaaacgttgaacaaagaaaaagattaaccattggtgttgaattaactgccaaaccaaaactgttggtctttttagatgaacctacttctggtttggattctcaaactgcttggtctatttgtcagctaatgaaaaagttggcaaatcatggtcaagcaattctatgtactattcaccaaccctctgctattttgatgcaagaattcgatcgtttactatttatgcaacgtggtggtaagactgtctactttggcgacttgggcgaaggttgtaaaactatgatcgattattttgaaagccatggtgctcataaatgccctgctgacgccaacccagctgaatggatgctagaagttgttggtgcagctccaggctctcatgcaaatcaagattattacgaagtttggaggaattctgaagagtacagggccgttcaatctgaattagattggatggaaagagaattaccaaagaaaggttcgataactgcagctgaggacaaacacgaattttcacaatcaattatttatcaaacaaaattggtcagtattcgtctattccagcaatattggagatctccagattatttatggtcgaagtttattttaactattttcaatcaattgttcatcggtttcactttcttcaaagcaggaacctcgctacagggtttacaaaatcaaatgttggctgtgttcatgtttacggttattttcaatcctattctacaacaatacctaccatcttttgtccagcaaagagatttgtatgaggccagggaacgcccctcaaggactttttcttggatttcatttatcttcgctcaaatattcgtggaagttccatggaatatattggcaggtactattgcttattttatctactattatccaattggattttactccaacgcgtctgcagctggccagttgcatgaaaggggtgctttattttggttgttctcttgtgctttctacgtttatgttggttctatgggtctgcttgtcatttcattcaaccaagttgcagaaagtgcagctaacttagcctctttgttgtttacaatgtctttgtctttttgtggtgttatgactaccccaagtgccatgcctagattttggatattcatgtacagggtttcacctttgacttatttcattcaggctctgttggctgttggtgttgctaacgtagacgtcaaatgcgctgattacgaattgctagaattcacaccaccatccggtatgacatgtgggcagtacatggaaccatatttacaactagcaaagactggttacttaactgatgaaaatgccactgacacctgtagtttctgtcaaatatctacaaccaatgattacttagctaatgtcaattctttctacagtgagagatggagaaattatggtatcttcatctgttatattgcattcaattatatcgctggtgtctttttctactggttagcaagagtgcctaaaaagaacggtaaactctccaagaaataa

SEQ ID NO: 250 - protein, 1511 aa, Saccharomyces cerevisiae
MPEAKLNNNVNDVTSYSSASSSTENAADLHNYNGFDEHTEARIQKLARTLTAQSMQNSTQSAPNKSDAQSIFSSGVEGVNPIFSDPEAPGYDPKLDPNSENFSSAAWVKNMAHLSAADPDFYKPYSLGCAWKNLSASGASADVAYQSTVVNIPYKILKSGLRKFQRSKETNTFQILKPMDGCLNPGELLVVLGRPGSGCTTLLKSISSNTHGFDLGADTKISYSGYSGDDIKKHFRGEVVYNAEADVHLPHLTVFETLVTVARLKTPQNRIKGVDRESYANHLAEVAMATYGLSHTRNTKVGNDIVRGVSGGERKRVSIAEVSICGSKFQCWDNATRGLDSATALEFIRALKTQADISNTSATVAIYQCSQDAYDLFNKVCVLDDGYQIYYGPADKAKKYFEDMGYVCPSRQTTADFLTSVTSPSERTLNKDMLKKGIHIPQTPKEMNDYWVKSPNYKELMKEVDQRLLNDDEASREAIKEAHIAKQSKRARPSSPYTVSYMMQVKYLLIRNMWRLRNNIGFTLFMILGNCSMALILGSMFFKIMKKGDTSTFYFRGSAMFFAILFNAFSSLLEIFSLYEARPITEKHRTYSLYHPSADAFASVLSEIPSKLIIAVCFNIIFYFLVDFRRNGGVFFFYLLINIVAVFSMSHLFRCVGSLTKTLSEAMVPASMLLLALSMYTGFAIPKKKILRWSKWIWYINPLAYLFESLLINEFHGIKFPCAEYVPRGPAYANISSTESVCTVVGAVPGQDYVLGDDFIRGTYQYYHKDKWRGFGIGMAYVVFFFFVYLFLCEYNEGAKQKGEILVFPRSIVKRMKKRGVLTEKNANDPENVGERSDLSSDRKMLQESSEEESDTYGEIGLSKSEAIFHWRNLCYEVQIKAETRRILNNVDGWVKPGTLTALMGASGAGKTTLLDCLAERVTMGVITGDILVNGIPRDKSFPRSIGYCQQQDLHLKTATVRESLRFSAYLRQPAEVSIEEKNRYVEEVIKILEMEKYADAVVGVAGEGLNVEQRKRLTIGVELTAKPKLLVFLDEPTSGLDSQTAWSICQLMKKLANHGQAILCTIHQPSAILMQEFDRLLFMQRGGKTVYFGDLGEGCKTMIDYFESHGAHKCPADANPAEWMLEVVGAAPGSHANQDYYEVWRNSEEYRAVQSELDWMERELPKKGSITAAEDKHEFSQSIIYQTKLVSIRLFQQYWRSPDYLWSKFILTIFNQLFIGFTFFKAGTSLQGLQNQMLAVFMFTVIFNPILQQYLPSFVQQRDLYEARERPSRTFSWISFIFAQIFVEVPWNILAGTIAYFIYYYPIGFYSNASAAGQLHERGALFWLFSCAFYVYVGSMGLLVISFNQVAESAANLASLLFTMSLSFCGVMTTPSAMPRFWIFMYRVSPLTYFIQALLAVGVANVDVKCADYELLEFTPPSGMTCGQYMEPYLQLAKTGYLTDENATDTCSFCQISTTNDYLANVNSFYSERWRNYGIFICYIAFNYIAGVFFYWLARVPKKNGKLSKK

SEQ ID NO: 251 - DNA, 957 bp, Saccharomyces cerevisiae
atgtcttccaacgcccaagtcaaaaccccattacctccagccccagctccaaagaaggaatctaactttttgattgatttcttaatgggtggtgtcagtgccgctgtcgccaaaactgctgcatctcccatcgaaagagttaaacttttgatccaaaaccaagatgaaatgttaaaacaaggtactttggacagaaaatacgcaggtatcttagactgtttcaagagaaccgctacacaggaaggtgttatctcattctggagaggtaacactgctaacgttatccgttatttccccactcaagctttgaatttcgccttcaaggacaagatcaaggccatgtttggtttcaagaaggaagaaggttacgccaaatggtttgccggtaacttggcatctggtggtgctgctggtgccttgtcattactatttgtttactctttggattatgcaagaactagattggctgctgactccaagtcctctaaaaagggtggtgctcgtcaattcaacggtttgatcgatgtctacaagaagaccttaaaatctgatggtgttgctggtctttacagaggtttcttaccttctgtcgttggtattgttgtctacagaggtctatacttcggtatgtacgattctttgaagcctctattgttgactggttctttggaaggttcattcttggcttcattcttgttgggttgggttgttactactggtgcttctacatgttcttacccattggataccgttagaagaagaatgatgatgacctccggtcaagctgttaagtacgacggtgcctttgactgtttgaggaagattgttgctgctgaaggtgttggttctctattcaagggttgtggtgctaacatcttaagaggtgtcgcaggtgctggtgttatctcaatgtacgaccaactgcaaatgatcttgtttggtaagaagttcaaataa

SEQ ID NO: 252 - protein, 318 aa, Saccharomyces cerevisiae
MSSNAQVKTPLPPAPAPKKESNFLIDFLMGGVSAAVAKTAASPIERVKLLIQNQDEMLKQGTLDRKYAGILDCFKRTATQEGVISFWRGNTANVIRYFPTQALNFAFKDKIKAMFGFKKEEGYAKWFAGNLASGGAAGALSLLFVYSLDYARTRLAADSKSSKKGGARQFNGLIDVYKKTLKSDGVAGLYRGFLPSVVGIVVYRGLYFGMYDSLKPLLLTGSLEGSFLASFLLGWVVTTGASTCSYPLDTVRRRMMMTSGQAVKYDGAFDCLRKIVAAEGVGSLFKGCGANILRGVAGAGVISMYDQLQMILFGKKFK

SEQ ID NO: 253 - DNA, 1101 bp, Saccharomyces cerevisiae
atgtaccatgttcctgaaatgaggctacattaccccctggtgaacactcaatctaacgccgcaataacacccaccagaagttacgacaatacccttccttcgtttaacgagctatcacaccagagtacaatcaatcttccattcgtccaacgcgaaactccaaacgcatatgctaatgttgcccaattagctacgtcgccaactcaggctaaatcagggtattattgtcgctattatgctgtgccttttcccacatatccacaacaaccacaatctccatatcaacaagctgtacttccttatgccaccattcccaacagcaatttccaaccatcttctttccctgtgatggcagtgatgcctccagaggttcaatttgatggatcattcttgaacaccttacatcctcacacagagttgcctccaatcattcaaaacactaatgatactagcgtcgcacgtccaaataaccttaaatcaatagcagcagcgtcaccaacagtgacagcaacaacaagaacacctggcgtcagttcaacgtcagttctcaaaccacgcgttataactacgatgtgggaagatgagaatactatctgctaccaagtagaggcgaacggtatatcagtcgtgcgtagggctgacaacaacatgattaacggcaccaagttgttgaatgtcacgaagatgacaagggggagaagggatggaatattaagatccgagaaggttagggaagtcgtgaagattggctccatgcacctcaagggtgtttggattcctttcgaaagggcttatatcctggctcaacgtgaacagattctagatcatctgtacccgctcttcgtcaaagatatagaatccattgttgatgccagaaagcccagcaacaaggcatctttgacccccaaatctagccctgcccccatcaagcaagaaccatctgataataaacacgaaattgctactgaaattaagccgaagagtattgatgctttatcgaatggagcatctactcagggtgctggcgaactgccccacttaaaaatcaaccatatcgatactgaggcccaaacaagtagagcaaaaaatgaattatcataa

SEQ ID NO: 254 - protein, 366 aa, Saccharomyces cerevisiae
MYHVPEMRLHYPLVNTQSNAAITPTRSYDNTLPSFNELSHQSTINLPFVQRETPNAYANVAQLATSPTQAKSGYYCRYYAVPFPTYPQQPQSPYQQAVLPYATIPNSNFQPSSFPVMAVMPPEVQFDGSFLNTLHPHTELPPIIQNTNDTSVARPNNLKSIAAASPTVTATTRTPGVSSTSVLKPRVITTMWEDENTICYQVEANGISVVRRADNNMINGTKLLNVTKMTRGRRDGILRSEKVREVVKIGSMHLKGVWIPFERAYILAQREQILDHLYPLFVKDIESIVDARKPSNKASLTPKSSPAPIKQEPSDNKHEIATEIKPKSIDALSNGASTQGAGELPHLKINHIDTEAQTSRAKNELS

SEQ ID NO: 255 - DNA, 1680 bp, Saccharomyces cerevisiae
atgatggaagaattctcgtacgatcacgattttaacacacattttgctacagatttggattatttgcaacatgaccaacaacaacaacaacagcaacaacatgatcaacaacataatcaacagcaacaaccacaaccacaaccaattcaaactcaaaacctggagcacgaccacgaccaacatactaatgatatgagtgcttcatcgaatgcatcagatagtggacctcaaaggcccaagaggactcgcgcaaagggtgaagcactagatgtgctaaagcgtaaatttgaaataaatccaacaccctctttggtagaaagaaagaaaatatcagatctgataggaatgcctgaaaaaaacgtcagaatttggtttcagaacagaagagctaaattgaggaaaaagcagcatggaagtaataaggacacaatcccctcgtcacaatcccgtgatattgccaacgattacgatcgtgggagtacagacaacaatttggtcactacaacaagtacttcatccatatttcacgatgaagacctgacttttttcgaccgtattccgctgaacagcaacaacaactattatttttttgacatttgctcaattactgtgggaagttggaatagaatgaaaagcggcgcactgcaaagaaggaactttcagtctataaaggagttgagaaacctatcgccaataaagattaataacataatgtcgaatgccacagatttaatggttttgatatccaagaaaaactcagaaataaactatttttttagtgccatggcaaataatactaaaattctcttcaggatctttttcccattaagttcagtcacgaattgctctctaactttagaaactgacgacgatataataaatagtaacaacacaagcgataaaaacaatagtaatactaataatgatgatgataacgacgataacagtaatgaagacaatgataatagtagtgaggataagaggaatgctaaggataactttggagaattgaagctaacagtcaccagatcacccacttttgctgtttactttttaaataatgctcctgatgaagatccaaatttgaacaatcagtggtccatatgtgatgatttctcagaaggtagacaggtaaatgacgcatttgttggtggttcgaatattcctcacactttgaaaggtttacagaaatcattaagattcatgaattctctaattctagactataaatcatcgaatgaaatattacctacgatcaatacagcgatccccactgctgcagttccacaacagaatattgcccctccctttctgaatacaaattcaagtgcaacagactcaaatccaaatacaaatttagaagattctctcttcttcgatcatgatctgttatcgagttcgataaccaacaccaacaacggacaaggctctaataatggacgtcaagctagcaaggatgatacgctcaatttactggatactaccgtcaacagcaataacaatcataatgctaataatgaggagaatcatctagcgcaagaacatttatccaacgatgctgatattgttgcaaatccaaatgatcatttgttgtctttaccgactgatagtgaactcccaaatactccagattttttgaagaacactaacgaactaactgacgagcatagatggatatga

SEQ ID NO: 256 - protein, 559 aa, Saccharomyces cerevisiae
MMEEFSYDHDFNTHFATDLDYLQHDQQQQQQQQHDQQHNQQQQPQPQPIQTQNLEHDHDQHTNDMSASSNASDSGPQRPKRTRAKGEALDVLKRKFEINPTPSLVERKKISDLIGMPEKNVRIWFQNRRAKLRKKQHGSNKDTIPSSQSRDIANDYDRGSTDNNLVTTTSTSSIFHDEDLTFFDRIPLNSNNNYYFFDICSITVGSWNRMKSGALQRRNFQSIKELRNLSPIKINNIMSNATDLMVLISKKNSEINYFFSAMANNTKILFRIFFPLSSVTNCSLTLETDDDIINSNNTSDKNNSNTNNDDDNDDNSNEDNDNSSEDKRNAKDNFGELKLTVTRSPTFAVYFLNNAPDEDPNLNNQWSICDDFSEGRQVNDAFVGGSNIPHTLKGLQKSLRFMNSLILDYKSSNEILPTINTAIPTAAVPQQNIAPPFLNTNSSATDSNPNTNLEDSLFFDHDLLSSSITNTNNGQGSNNGRQASKDDTLNLLDTTVNSNNNHNANNEENHLAQEHLSNDADIVANPNDHLLSLPTDSELPNTPDFLKNTNELTDEHRWI

SEQ ID NO: 257 - DNA, 993 bp, Saccharomyces cerevisiae
atgagttcaccagcgaacctattccctggattaaacgacataactgacgtgctggaggaattcccactggccacctccagatatttaacattactacacgaaatagatgcaaaatgtgtgcattctatgccgaatttgaacgagaggatagataagttcttgaagaaagacttcaataaagatcaccaaacacaagtaagactgctcaataatatcaacaagatttatgaagaactgatgccatcgctggaggagaaaatgcatgtctcatccattatgctggataatctagacagattgacgtcccggttagaattggcgtatgaagtcgcaatcaagaacacagaaattcctagaggtttaagactgggtgtggacaaccatccagcaatgcacctccatcatgaactaatggaaaaaatagagagcaaatcaaacagcaaatcgtcgcaggcactgaagagcgaatcaagaagagaagccatggctgccaacaggaggcagggcgaacattactccgccagcacacaccaacaagacgactcaaagaacgacgcaaactacggaggcagcaggcacgagagccaagaccacactggtaacaacacaaactcaagaaaaagagccaacgctgccaataccaacaacgccgatccagagaccaaaaaacgcaagaggagagttgccaccacagccgtttcaccaagcactatcagcacggcaactgccgtcaataatggcaggataggtacatctacagcgtccaggggagttagcagcgtcggaaacagcaacaacagcaggatatcaagaccaaaaaccaacgactacggcgaaccgctctactgctactgtaaccaagtggcatacggggaaatggtggggtgtgatggcgcagactgtgagctagaatggttccatttgccatgtattggactcgaaactctacctaagggcaagtggtattgcgacgactgcaaaaaaaaactgtga

SEQ ID NO: 258 - protein, 330 aa, Saccharomyces cerevisiae
MSSPANLFPGLNDITDVLEEFPLATSRYLTLLHEIDAKCVHSMPNLNERIDKFLKKDFNKDHQTQVRLLNNINKIYEELMPSLEEKMHVSSIMLDNLDRLTSRLELAYEVAIKNTEIPRGLRLGVDNHPAMHLHHELMEKIESKSNSKSSQALKSESRREAMAANRRQGEHYSASTHQQDDSKNDANYGGSRHESQDHTGNNTNSRKRANAANTNNADPETKKRKRRVATTAVSPSTISTATAVNNGRIGTSTASRGVSSVGNSNNSRISRPKTNDYGEPLYCYCNQVAYGEMVGCDGADCELEWFHLPCIGLETLPKGKWYCDDCKKKL

SEQ ID NO: 259 - DNA, 939 bp, Saccharomyces cerevisiae
atgggccgtacaacttctgagggaatacacggttttgtggacgatctagagcccaagagcagcattcttgataaagtcggagactttatcaccgtaaacacgaaacggcatgatgggcgcgaggacttcaacgagcaaaacgacgagctgaacagtcaagagaaccacaacagcagtgagaatgggaacgagaatgaaaatgaacaagacagtctcgcgttggacgacctagaccgcgcctttgagctggtggaaggtatggatatggactggatgatgccctcgcatgcgcaccactccccagctacaactgctacaatcaagccgcggctattatattcgccgctaatacacacgcaaagtgcggttcccgtaaccatttcgccgaacttggtcgctactgctacttccaccacatccgctaacaaagtcactaaaaacaagagtaatagtagtccgtatttgaacaagcgcagaggtaaacccgggccggattcggccacttcgctgttcgaattgcccgacagcgttatcccaactccgaaaccgaaaccgaaaccaaagcaatatccgaaagttattctgccgtcgaacagcacaagacgcgtatcaccggtcacggccaagaccagcagcagcgcagaaggcgtggtcgtagcaagtgagtctcctgtaatcgcgccgcacggatcgagccattcgcggtcgctgagtaagcgacggtcatcgggcgcgctcgtggacgatgacaagcgcgaatcacacaagcatgcagagcaagcacggcgtaatcgattagcggtcgcgctgcacgaactggcgtctttaatccccgcggagtggaaacagcaaaatgtgtcggccgcgccgtccaaagcgaccaccgtggaggcggcctgccggtacatccgtcacctacagcagaacgtgagcacgtga

SEQ ID NO: 260 - protein, 312 aa, Saccharomyces cerevisiae
MGRTTSEGIHGFVDDLEPKSSILDKVGDFITVNTKRHDGREDFNEQNDELNSQENHNSSENGNENENEQDSLALDDLDRAFELVEGMDMDWMMPSHAHHSPATTATIKPRLLYSPLIHTQSAVPVTISPNLVATATSTTSANKVTKNKSNSSPYLNKRRGKPGPDSATSLFELPDSVIPTPKPKPKPKQYPKVILPSNSTRRVSPVTAKTSSSAEGVVVASESPVIAPHGSSHSRSLSKRRSSGALVDDDKRESHKHAEQARRNRLAVALHELASLIPAEWKQQNVSAAPSKATTVEAACRYIRHLQQNVST

SEQ ID NO: 261 - DNA, 918 bp, Saccharomyces cerevisiae
atgtcttcttcttcacaatttaagcagttagaaaagcttggcaatggtacgtatgccacagtgtacaagggactgaacaaaaccacaggggtatatgttgccctgaaagaggtaaaactggattcagaggaaggtacaccctctacggccatccgtgagatctccctaatgaaagaattgaaacatgagaacattgttagactttatgacgttattcacacagagaacaagttgactttggtttttgaattcatggacaacgatttaaagaaatacatggattcccgcaccgtgggcaacacaccaagagggctagaactaaacttggttaaatacttccagtggcaactactgcaagggctggccttttgccatgaaaacaagattctccaccgtgatttaaaacctcaaaacctattaatcaacaagagaggccagttgaaattgggtgatttcggtctggcccgtgctttcggtattccggtcaacacattttcaagcgaagtcgtaacgttgtggtaccgtgctcctgatgtgctaatgggttctaggacgtactccacatccattgatatatggtcgtgtgggtgcattcttgcggaaatgataacgggtaagcctttgtttcctggcaccaacgacgaagaacaactgaaattgatcttcgacatcatgggcactcctaatgagtccctatggcccagtgtaacaaagttacccaaatacaacccaaatatccagcaacgaccaccaagagacctacgtcaagtattgcaaccacacaccaaagaaccgctagacgggaatctcatggatttcttacacggactcttgcaacttaatccggatatgaggctgagcgccaagcaggctctgcatcacccttggtttgcagagtactaccaccacgcttcataa

SEQ ID NO: 262 - protein, 305 aa, Saccharomyces cerevisiae
MSSSSQFKQLEKLGNGTYATVYKGLNKTTGVYVALKEVKLDSEEGTPSTAIREISLMKELKHENIVRLYDVIHTENKLTLVFEFMDNDLKKYMDSRTVGNTPRGLELNLVKYFQWQLLQGLAFCHENKILHRDLKPQNLLINKRGQLKLGDFGLARAFGIPVNTFSSEVVTLWYRAPDVLMGSRTYSTSIDIWSCGCILAEMITGKPLFPGTNDEEQLKLIFDIMGTPNESLWPSVTKLPKYNPNIQQRPPRDLRQVLQPHTKEPLDGNLMDFLHGLLQLNPDMRLSAKQALHHPWFAEYYHHAS

SEQ ID NO: 263 - DNA, 1239 bp, Aspergillus nidulans
atgtcgaactactcgcattcaagcaataatcccttccttaaggtgtcaacgaaagaggataaaccctcgtcgtttcataaaatcgcagaggacgaagagtacgaggtgacgtcaccaaccgatgcaacctttcgagcctccaagaatgccgacaactcagctggtggaaataacccgctcgagagtggtcgagctggagaatcgggcgatggaatacgctttggaagagacccctttggtaatttccagggtggtgcggaaggccaggacgagtcctccatcgaccctaatggcttccgccctacgggtggccccgatcatggctttcccaacaattacgccctgggccgtcgaacatccgtatctgctgaatctctgaaccctacatccgcgggatcagacagctggaccccgccgagccacccgaaatctgaagaacagctcgcccggttgaagacagctgtcagcaacaacttcctcttttcccacctggatgacgagcagtccaggacggtactagatgctttggttgagaaacctatacccgcaaaagatattaaagtgatctcccaaggggatgccggcgactatttctacattgttgaagagggccatttcgacgtttatatcaatccctctggctccgtgcaaccgggcccagacggggctggcaccaagatcagcacgatcggccctggcggctcgtttggagagctggctctaatgtacaacgcgccgcgagcggcaaccattgtatcgacagagcctaaaagcactctatgggctttagaccgtataaccttccgacgcattctcatggactcggcattccagcgacgacgcatgtatgaggctttcttggaagaagtcccgctcctgtccagtctcaaaccttacgagcgggcaaagatcgcggacgctctcgacacaatcaagtttccggccggggaatatatcattaaagaaggtgatccgggagacgccttttacctgcttgaatccggcgaggccgaggcttttatggagggcgtcgaagaacccgtgaagtcatacaaaaggggagattacttcggtgaactggctctactagacgacaaacctagagcagccagcgttcgcgcgaagacggaggtcaaggtcgccaagcttggtagagatggattcaaacgtctgttgggcccggtggaaaacatcatgagaaggacggaatactcgtcgaggccatctacagctacataa

SEQ ID NO: 264 - protein, 412 aa, Aspergillus nidulans
MSNYSHSSNNPFLKVSTKEDKPSSFHKIAEDEEYEVTSPTDATFRASKNADNSAGGNNPLESGRAGESGDGIRFGRDPFGNFQGGAEGQDESSIDPNGFRPTGGPDHGFPNNYALGRRTSVSAESLNPTSAGSDSWTPPSHPKSEEQLARLKTAVSNNFLFSHLDDEQSRTVLDALVEKPIPAKDIKVISQGDAGDYFYIVEEGHFDVYINPSGSVQPGPDGAGTKISTIGPGGSFGELALMYNAPRAATIVSTEPKSTLWALDRITFRRILMDSAFQRRRMYEAFLEEVPLLSSLKPYERAKIADALDTIKFPAGEYIIKEGDPGDAFYLLESGEAEAFMEGVEEPVKSYKRGDYFGELALLDDKPRAASVRAKTEVKVAKLGRDGFKRLLGPVENIMRRTEYSSRPSTAT

SEQ ID NO: 265 - DNA, 3456 bp, Saccharomyces cerevisiae
atgagtttttcacaattggagcagaacattaaaaaaaagatagccgtcgaagaaaatattattcggggagcttctgccctcaagaaaaagactagcaatgttatggtcattcagaaatgtaatacgaatattagagaggcacgtcaaaatcttgagtacttggaggatagcttaaaaaaattacggttgaagaccgctcaacaaagtcagggtgaaaatggcagcgaagataatgagcgattcaattcgaaggaatacgggtttctttctaccaaatcgccaaatgaacacatattttctcgtttggatttagtaaaatatgattgcccttctttggcgcaaagaatccaatacatgttgcaacaattagaattcaaattacaggtggaaaagcaataccaagaagccaatactaaattgactaaattgtatcaaattgacggtgatcaacgtagtagttctgcggcagaagggggtgctatggaatccaaatacaggattcaaatgcttaacaaagctttgaagaaataccaagctattaacgttgactttgatcaatttaaacaccaacccaatgacataatggataatcaacaaccgaaattccgaagaaaacaactgactggcgttctaacaattggaataactgctgctagagatgttgaccatatacaatcaccgatgtttgccaggaagccagagagctacgttactataaaaatcgatgatacgatcaaagccagaacgaagccttctagaaatgacaggtggagtgaagattttcaaattccagttgaaaaagggaatgaaatcgagattactgtatatgataaggtgaacgactcgctcattccagtggctataatgtggttactgctttccgatatcgctgaagaaattcgtaagaagaaagccggacaaacaaatgaacaacaaggatgggtcaacgcttcaaacattaatggtggttcttctctcgctagcgaagagggaagcacattgacttctacatactcaaactcagccattcagtctacttcagcaaagaatgtgcaaggcgaaaatacatcaactagtcaaatcagtacgaattcatggtttgtcttagaaccatccgggcagattttgttaacactaggattccacaagtcttctcaaatagaaaggaagcagttgatgggtggactacatcgtcatggtgctattatcaataggaaagaagagatattcgaacagcatggccaccactttgtacaaaaatcattttacaacattatgtgctgtgcatattgtggtgatttccttcggtatactgggttccaatgtcaagattgtaaatttttatgtcacaaaaaatgttacaccaatgttgttactaagtgtattgctaaaacttctactgatacggatccggacgaggcaaagttgaaccaccgtattcctcatagattcctgcctacttcaaaccgtggtactaaatggtgctgtcactgtggttatattttaccatggggtagacataaagtacgcaaatgttctgaatgtggtataatgtgtcatgctcaatgtgctcatttggttcccgatttctgtggcatgtcgatggaaatggctaataaaattctgaaaacgattcaagacacaaaacgtaatcaagagaaaaagaagaggacagttccgtcggcacagttggggtcatctattggtactgccaatggtagtgatctttccccatccaaattagctgaaagggcaaacgctcctttgcctcctcagccaagaaaacatgataaaactccttcgcctcagaaggtaggaagagattctccaactaagcagcatgatcctattattgataaaaaaatttcactacaaacgcacgggcgtgagaaactaaataaatttatcgatgaaaatgaggcctatttaaattttacagaaggtgcacaacaaaccgccgaattttcatcaccagagaaaacactggatccaacgtcgaatagacgttccttgggactcactgatttatctattgagcatagtcaaacttgggaatctaaagatgatttaatgagagatgaacttgaactgtggaaagcacaacgtgaggaaatggaacttgaaataaaacaagatagtggggaaatccaagaggatctagaagttgatcacattgatttagagaccaaacagaaactagactgggagaacaaaaatgatttccgtgaagctgatttgacaatagattccacacacacaaatccattccgcgatatgaatagtgaaacctttcaaattgaacaagaccatgcttcaaaggaagtactacaagaaacagtgtccttggctcctacaagtactcatccctccagaaccactgatcaacaatctccgcagaaatcacaaaccagcacaagcgcaaagcataaaaagagagcggctaaacgtcgtaaggtttcattagataatttcgtattactcaaagttcttggtaaaggtaattttggtaaagttattttatctaaatcaaagaatactgacaggctttgtgccataaaagttctgaagaaagataatattattcaaaatcatgacatcgagagtgcaagagcagaaaagaaagtatttttgttagccacaaaaactaaacacccattcttaaccaatctatactgctcttttcaaactgaaaaccgtatatattttgctatggagtttattgggggcggtgacttaatgtggcatgttcaaaaccaaagactatctgtaagaagggccaaattttatgccgccgaggtcttactggctctgaaatattttcatgataatggtgtaatataccgtgatttgaagttggaaaacattctattaactccagaaggtcatataaaaattgccgattatggtttgtgtaaagatgaaatgtggtatggtaatagaacttctacattttgtggcacaccagaatttatggctccagaaattttaaaagagcaagaatataccaaagctgtcgattggtgggcatttggggtgctgctatatcaaatgctactgtgccaatctccattctcaggagatgacgaagatgaagtttttaacgctatccttaccgatgaacccttatacccaatagatatggcaggtgagattgtacaaatattccaaggcctattaacaaaagatcctgaaaagaggttgggtgctggtcccagggacgcagacgaagttatggaagaacctttcttccgtaacatcaactttgacgatatcttaaaccttcgcgtgaaaccaccctacatcccagaaattaaatctccggaagatacatcatatttcgagcaagaattcacctctgcgccacccacacttacacctctgccctctgttttgacaacgagccagcaagaagagtttagaggattttcctttatgccagatgatttggatttatga

SEQ ID NO: 266 - protein, 1151 aa, Saccharomyces cerevisiae
MSFSQLEQNIKKKIAVEENIIRGASALKKKTSNVMVIQKCNTNIREARQNLEYLEDSLKKLRLKTAQQSQGENGSEDNERFNSKEYGFLSTKSPNEHIFSRLDLVKYDCPSLAQRIQYMLQQLEFKLQVEKQYQEANTKLTKLYQIDGDQRSSSAAEGGAMESKYRIQMLNKALKKYQAINVDFDQFKHQPNDIMDNQQPKFRRKQLTGVLTIGITAARDVDHIQSPMFARKPESYVTIKIDDTIKARTKPSRNDRWSEDFQIPVEKGNEIEITVYDKVNDSLIPVAIMWLLLSDIAEEIRKKKAGQTNEQQGWVNASNINGGSSLASEEGSTLTSTYSNSAIQSTSAKNVQGENTSTSQISTNSWFVLEPSGQILLTLGFHKSSQIERKQLMGGLHRHGAIINRKEEIFEQHGHHFVQKSFYNIMCCAYCGDFLRYTGFQCQDCKFLCHKKCYTNVVTKCIAKTSTDTDPDEAKLNHRIPHRFLPTSNRGTKWCCHCGYILPWGRHKVRKCSECGIMCHAQCAHLVPDFCGMSMEMANKILKTIQDTKRNQEKKKRTVPSAQLGSSIGTANGSDLSPSKLAERANAPLPPQPRKHDKTPSPQKVGRDSPTKQHDPIIDKKISLQTHGREKLNKFIDENEAYLNFTEGAQQTAEFSSPEKTLDPTSNRRSLGLTDLSIEHSQTWESKDDLMRDELELWKAQREEMELEIKQDSGEIQEDLEVDHIDLETKQKLDWENKNDFREADLTIDSTHTNPFRDMNSETFQIEQDHASKEVLQETVSLAPTSTHPSRTTDQQSPQKSQTSTSAKHKKRAAKRRKVSLDNFVLLKVLGKGNFGKVILSKSKNTDRLCAIKVLKKDNIIQNHDIESARAEKKVFLLATKTKHPFLTNLYCSFQTENRIYFAMEFIGGGDLMWHVQNQRLSVRRAKFYAAEVLLALKYFHDNGVIYRDLKLENILLTPEGHIKIADYGLCKDEMWYGNRTSTFCGTPEFMAPEILKEQEYTKAVDWWAFGVLLYQMLLCQSPFSGDDEDEVFNAILTDEPLYPIDMAGEIVQIFQGLLTKDPEKRLGAGPRDADEVMEEPFFRNINFDDILNLRVKPPYIPEIKSPEDTSYFEQEFTSAPPTLTPLPSVLTTSQQEEFRGFSFMPDDLDL

SEQ ID NO: 267 - DNA, 1110 bp, Saccharomyces cerevisiae
atggatacagatttagatgtgcctatgcaagatgctgttaccgaacagctgactcccacagtatctgaagatatggatctcaacaacaattcatcggataataatgcagaagaattctcggttgatgatttaaaacctggttcctcgggcatagcagatcacaaatcttccaaaccactagaactgaataacacaaatataaatcagcttgaccaatggattgagcatttgagtaaatgcgagccactatcagaagacgatgtagcacgactatgtaaaatggcggtggacgtgttgcagttcgaggagaatgttaaaccaattaacgtgcctgttaccatttgtggtgacgtacacggtcaattccatgacttgttagaactttttaagattggtggcccttgtcctgacaccaattaccttttcatgggtgattacgtggatagaggatattattctgttgaaactgtatcttacctagttgccatgaaagtcagatacccacatagaattacgatactgagaggcaatcacgagtctaggcagattacccaagtatacgggttttatgatgaatgtttgagaaagtacggcagtgcaaacgtgtggaaaatgttcacagatcttttcgattattttcctataaccgcattagtagataataaaattttctgtctgcatggaggactttcccccatgatagaaaccatagatcaggtgagagagttgaacagaatacaggaagtgcctcatgaaggtcctatgtgtgaccttctatggtcagaccctgacgatagaggcggatggggaatcagtcccagaggtgcaggcttcacttttggacaagatgtcagtgagcaattcaatcacactaatgatctatcactaatagcaagagctcaccaattggtaatggaaggctatgcttggtctcaccagcaaaatgttgtcaccattttcagtgctcctaattactgctacagatgtggtaatcaagcagctatcatggaagtggacgagaatcataatagacaattcttacagtacgacccatccgtaagaccaggtgaacctagcgtcagcagaaagacgccagattactttttatga

SEQ ID NO: 268 - protein, 369 aa, Saccharomyces cerevisiae
MDTDLDVPMQDAVTEQLTPTVSEDMDLNNNSSDNNAEEFSVDDLKPGSSGIADHKSSKPLELNNTNINQLDQWIEHLSKCEPLSEDDVARLCKMAVDVLQFEENVKPINVPVTICGDVHGQFHDLLELFKIGGPCPDTNYLFMGDYVDRGYYSVETVSYLVAMKVRYPHRITILRGNHESRQITQVYGFYDECLRKYGSANVWKMFTDLFDYFPITALVDNKIFCLHGGLSPMIETIDQVRELNRIQEVPHEGPMCDLLWSDPDDRGGWGISPRGAGFTFGQDVSEQFNHTNDLSLIARAHQLVMEGYAWSHQQNVVTIFSAPNYCYRCGNQAAIMEVDENHNRQFLQYDPSVRPGEPSVSRKTPDYFL

SEQ ID NO: 269 - DNA, 1134 bp, Saccharomyces cerevisiae
atggatatggaaattgatgaccctatgcatggttcagatgaagatcaattatcaccgactctcgacgaagacatgaatagtgatgacggcaaaaataatacgaaggcgcgttctaatgacgaagacacagatgaagagttggaagattttaattttaaaccggggtcctcgggtatagcagatcataaatcctccaaaccactaaaactgaccaatacaaatataaatcagcttgaccaatggattgagcatttgagtaaatgcgagccactatcagaagacgatgtagcacgactatgtaaaatggcggtggacgtgttgcagttcgaggagaatgttaaaccaattaacgtgcctgttaccatttgtggtgacgtacacggtcaattccatgacttgttagaacttttcaagattggtggtccttgtcctgacaccaattaccttttcatgggtgattacgtggatagaggatattattctgttgagaccgtatcttacctagttgccatgaaagtcagatatccacatagaattactatacttaggggcaatcacgagtctaggcagattacccaagtatatgggttttatgacgaatgtttgagaaagtacggcagtgcgaacgtgtggaaaatgtttaccgatctattcgattatttccccgttactgccttggtggataataaaatcttctgtttgcatggaggtctctcacccatgatagagacaatagatcaagttagagatttaaatagaatacaggaagtgcctcacgaaggtccaatgtgtgaccttctatggtccgatcctgatgatagaggcggatggggaatcagtccgagaggtgcaggcttcacttttggtcaagacatcagtgagcaattcaatcacactaatgacctatcactaatagcaagagctcaccaattggtaatggaaggatattcttggtctcaccagcaaaatgttgtcaccattttcagtgctccaaattattgttatagatgtggtaaccaggccgctattatggaggtggatgaaaaccataataggcaattcttacaatacgatccatctgtgagacccggtgaaccaaccgtcaccaggaagacaccggattatttcttataa

SEQ ID NO: 270 - protein, 377 aa, Saccharomyces cerevisiae
MDMEIDDPMHGSDEDQLSPTLDEDMNSDDGKNNTKARSNDEDTDEELEDFNFKPGSSGIADHKSSKPLKLTNTNINQLDQWIEHLSKCEPLSEDDVARLCKMAVDVLQFEENVKPINVPVTICGDVHGQFHDLLELFKIGGPCPDTNYLFMGDYVDRGYYSVETVSYLVAMKVRYPHRITILRGNHESRQITQVYGFYDECLRKYGSANVWKMFTDLFDYFPVTALVDNKIFCLHGGLSPMIETIDQVRDLNRIQEVPHEGPMCDLLWSDPDDRGGWGISPRGAGFTFGQDISEQFNHTNDLSLIARAHQLVMEGYSWSHQQNVVTIFSAPNYCYRCGNQAAIMEVDENHNRQFLQYDPSVRPGEPTVTRKTPDYFL

SEQ ID NO: 271 - DNA, 2715 bp, Saccharomyces cerevisiae
atgaagcagaaaaaatttaactccaaaaaaagtaatagaacagatttatcaaaaagaggagattctcctaatataggaatttccaaatctagaactgcatgtaaacgatgtcgattgaaaaaaattaaatgtgatcaggagtttcctagctgtaagaggtgtgcaaaattagaggtaccatgtgtttctttggacccagccaccggaaaggacgttccaagatcttacgtcttttttctggaagatagattggctgtcatgatgcgtgtgttgaaagaatatggagtagatcccacgaaaatacgaggaaatatacctgctacaagtgatgatgaaccttttgatttgaaaaagtacagttcagtttcatctttgggagaagagggaatattgccacataatggcttattggcggattatttggttcagaaagggaattctatggcatcctcagctataacgagcaagtctatggcaagcccacagactataaatgtacaacgcaaggaatttctggtaaactcaaaaaaacaagatggtagcgctttattacccgagacaggcagccctatgacttcagatgcaagagcggaagagctacgccgatgtaataaggagatcagtgcgctgggcacgatgagagaaagtagttttaactcttttttaggagattcatcgggtatttcctttgcgaaattagtcttcacggcaactaattttcgtcaagattccggagatgacgttctggatgaagatattaaacaaagggaacagaaatacaatggatatgcagaggctgaaaacaatccacactttgatccattggaactaccacctcgacatgccgctgaagttatgatatccaggttttttgtagatactaattcccagttacctttgctgcatagagaacttttcctgaaaaaatactttgaacctatttatggtccctggaatcccaatattgcattggcatctgatcagacaggcataaatagcgcgttcgaaattccaattaccagtgcttttagtgcgcatactgaaccaaaaagggagaacgttactgagaagattgacgtatgctcttccgtggatgttccatggtatgacacttgggagacatctcaaaaagtcaacatgcgtccgatagttgaactaccgacaaaatttcacataccttatttttttttaaacattatatttgctattggccatgctacgcaggtacttaagtcagatattactactgtcgcgacatataagagacgcgctactaaatatattgcatctttattttcatcttcagacaggttggaggcattggcaggcactttgctcatggtaatctattcaataatgagacctaatgtccccggtgtttggtatactatgggttctgtactaagactaacggttgacctaggactacattcggaaaaaattaataaaaattatgacgcctttaccagagaaatacgcaggcgtctattttggtgcgtttactccttagatcggcaaatttgctcgtattttggtcgaccttttggtatacctgaagaaagcatcaccaccaggtatcctagccttttggacgattccttcatcacattaactaaccgagaaattgacgactactcagacttaccaagcccaaatccgtcttcaaaagttatcgcattggccatgtataaaatcagaagaatccaagctagtatagtgagaatactctacgcgcccggtgcagaattgccgaggaggtttatggatctcgagagctggcggattgaaacctacaatgagcttgagcgttggttccaagtggacgttcccaaaaactttgagatgatgaattgcaaatttaacagcatctggtttgatctgaactatcattactcgaagagcattctttatggactttctccaaaattccctactttgaatgataccgcttttaaaattgtcctggacagtacgaagggcaccatagacgtattttacaatctttgtgtcaataaaaaaattggttacacgtgggtagcagttcataacatgttcatgacaggtatgacttacctttacgtaaatttttactcaaaaaacaacataaatgattgtcaagaaaaagtgtcagagtacactgaaaaagtgttgatagtactgaagaatctgataggtttttgcgaatctgcgaaaacctgttacacgagttacaaaattttatcatcagttgtaataaagttaaaatttatgcaaataaatgatgccaaagggatattttcggattcaaatcccctaacctctcaggcaaaccgcatgtcaagttatgataaaaaaacgaacgtacttggttttgacgacggtacttttgataacaaggtttttaatagaaccaattttgaagaaaaagcaccttttgatatacctctagatgaattttttaccgaactggaaaaacacagcaatgtttcccagtttaatactttagatgtaagcgaaggtaatcaagtgataaatgaaagtgcttctacaaatacgtcttctgcattgaattgccagtcgtataccaataatcaagatatcatggatatccttttccaggttacttcgggatctgtatgggatgagttttttgtcaggtctggtaacggaaacgaaggcgagtcttcttacgatatcagtaaaggaaagaactctgaatccggtggaatattttag

SEQ ID NO: 272 - protein, 904 aa, Saccharomyces cerevisiae
MKQKKFNSKKSNRTDLSKRGDSPNIGISKSRTACKRCRLKKIKCDQEFPSCKRCAKLEVPCVSLDPATGKDVPRSYVFFLEDRLAVMMRVLKEYGVDPTKIRGNIPATSDDEPFDLKKYSSVSSLGEEGILPHNGLLADYLVQKGNSMASSAITSKSMASPQTINVQRKEFLVNSKKQDGSALLPETGSPMTSDARAEELRRCNKEISALGTMRESSFNSFLGDSSGISFAKLVFTATNFRQDSGDDVLDEDIKQREQKYNGYAEAENNPHFDPLELPPRHAAEVMISRFFVDTNSQLPLLHRELFLKKYFEPIYGPWNPNIALASDQTGINSAFEIPITSAFSAHTEPKRENVTEKIDVCSSVDVPWYDTWETSQKVNMRPIVELPTKFHIPYFFLNIIFAIGHATQVLKSDITTVATYKRRATKYIASLFSSSDRLEALAGTLLMVIYSIMRPNVPGVWYTMGSVLRLTVDLGLHSEKINKNYDAFTREIRRRLFWCVYSLDRQICSYFGRPFGIPEESITTRYPSLLDDSFITLTNREIDDYSDLPSPNPSSKVIALAMYKIRRIQASIVRILYAPGAELPRRFMDLESWRIETYNELERWFQVDVPKNFEMMNCKFNSIWFDLNYHYSKSILYGLSPKFPTLNDTAFKIVLDSTKGTIDVFYNLCVNKKIGYTWVAVHNMFMTGMTYLYVNFYSKNNINDCQEKVSEYTEKVLIVLKNLIGFCESAKTCYTSYKILSSVVIKLKFMQINDAKGIFSDSNPLTSQANRMSSYDKKTNVLGFDDGTFDNKVFNRTNFEEKAPFDIPLDEFFTELEKHSNVSQFNTLDVSEGNQVINESASTNTSSALNCQSYTNNQDIMDILFQVTSGSVWDEFFVRSGNGNEGESSYDISKGKNSESGGIF

SEQ ID NO: 273 - DNA, 2079 bp, Saccharomyces cerevisiae
atgggtaattcaagttcaaaatcttcgaaaaaggattcacattcgaattcctcctcgagaaatcctcgtcctcaagtgtcgagaaccgagacttcccattctgtgaagtctgcaaaatcaaataaatcttcaagatcaaggcgatctcttccttcttcgtccactacgaatactaattcaaacgtccctgatccctccactccatcaaagcccaatcttgaggttaatcaccaacgacatagctctcacacgaatcgttaccatttcccatctagctcacactcgcattcaaattctcaaaacgaattgttaactactccttcatcatcctctactaagaggccttctacttctagaagatcaagttataatactaaggctgctgctgatttaccaccttcaatgatccaaatggaacccaagtcacccattttaaaaacaaacaatagtagcacacacgtatccaagcataaatcttcatactcatctacctattatgagaacgccttaaccgatgatgacaatgatgataaagacaacgacatctcgcacactaaaaggttttctagatcttcgaattctcgtccgtccagtataagaagcggatcagtgtcaagaaggaaatcagatgtgacccatgaagagcctaacaatggatcatactcctctaacaatcaggagaattatctcgttcaggcattaacccggtcaaattctcatgcatcttcgctacacagtaggaaatcttcgtttggatcagatggtaataccgcatacagcaccccattaaactctccaggcttgtccaagctaacagatcactctggtgaatactttacctctaattcaacctcctcattgaatcaccattcaagtcgcgatatttacccgagcaaacacatcagcaatgatgatgacattgaaaattcatctcaattgagtaatatccatgcatcaatggaaaatgttaatgataaaaataataatataacagatagcaaaaaagatccgaatgaggaatttaatgatataatgcaatcttccggaaacaaaaacgctccaaaaaaattcaaaaagcctatcgatattgatgaaactatccaaaaattactggatgcgggctacgctgctaagagaacaaaaaatgtttgtttgaagaacaatgaaattttacagatttgcatcaaggctcgtgaaatctttctttctcaaccttccttattagaattatcacctcctgtaaaaattgtaggcgacgttcatggccaatatggggatctcttaaggctttttaccaaatgtgggttcccaccatcctcgaactatttattcctaggtgattatgtggaccgtggtaaacagtcactggagactattttactattgttttgttacaaaataaaataccctgaaaatttctttttattgagaggcaaccatgaatgtgctaacgtcacaagggtttatggattttatgatgaatgtaaacgtcgttgtaacatcaagatctggaagacattcatcgatacttttaatacattaccattagctgctatcgtagccggaaagattttttgtgttcatggtggattgtcgccagttttaaattctatggatgaaatcagacatgtagttaggcctactgatgtaccagattttggcttaattaatgatcttttgtggtccgatcccacagattcacccaacgaatgggaggataacgaacgtggtgtaagttactgttataataaggtggcaattaacaaattcttgaacaagtttgggtttgatttggtttgtagagctcacatggttgtggaagacggttatgaatttttcaatgatagaagtctcgttacggtgttttccgcgccaaattattgtggtgaatttgataattggggggctgtaatgagcgtcagcgaaggtttattgtgctcttttgaattgttagatccactagatagtgcagctttgaagcaagttatgaagaaaggtagacaggaaagaaaactggctaatcaacaacagcaaatgatggaaacaagcatcacaaatgataacgaatctcaacagtaa

SEQ ID NO: 274 - protein, 692 aa, Saccharomyces cerevisiae
MGNSSSKSSKKDSHSNSSSRNPRPQVSRTETSHSVKSAKSNKSSRSRRSLPSSSTTNTNSNVPDPSTPSKPNLEVNHQRHSSHTNRYHFPSSSHSHSNSQNELLTTPSSSSTKRPSTSRRSSYNTKAAADLPPSMIQMEPKSPILKTNNSSTHVSKHKSSYSSTYYENALTDDDNDDKDNDISHTKRFSRSSNSRPSSIRSGSVSRRKSDVTHEEPNNGSYSSNNQENYLVQALTRSNSHASSLHSRKSSFGSDGNTAYSTPLNSPGLSKLTDHSGEYFTSNSTSSLNHHSSRDIYPSKHISNDDDIENSSQLSNIHASMENVNDKNNNITDSKKDPNEEFNDIMQSSGNKNAPKKFKKPIDIDETIQKLLDAGYAAKRTKNVCLKNNEILQICIKAREIFLSQPSLLELSPPVKIVGDVHGQYGDLLRLFTKCGFPPSSNYLFLGDYVDRGKQSLETILLLFCYKIKYPENFFLLRGNHECANVTRVYGFYDECKRRCNIKIWKTFIDTFNTLPLAAIVAGKIFCVHGGLSPVLNSMDEIRHVVRPTDVPDFGLINDLLWSDPTDSPNEWEDNERGVSYCYNKVAINKFLNKFGFDLVCRAHMVVEDGYEFFNDRSLVTVFSAPNYCGEFDNWGAVMSVSEGLLCSFELLDPLDSAALKQVMKKGRQERKLANQQQQMMETSITNDNESQQ

SEQ ID NO: 275 - DNA, 2133 bp, Saccharomyces cerevisiae
atgggtaattccggttcgaaacaacataccaagcacaatagcaagaaggatgaccacgacggtgacaggaaaaagacactagatctcccaccactgacaaaatcggatactacacattcgctgaaatcgtcaaggtcgctgaggtcgctgcggtcgaaacgctcagaggcgtcgttggcatctaatgttcaagctcaaacgcaacccctctcccgcagatcgtccactctgggaaacggcaatcgcaaccataggcgatcaaacaacgccccaatcactcctcctaataaccactacctaacctcacatcccagttcgtcaagaagactctcttcctcttcgagaaggtcgagcatggggaataataacaattcagaattgcccccgtcaatgatccagatggagcccaaatcacccatcttgaaaaatagtacaagcatgcattccactagctctttcaactcttacgaaaatgcgttgactgatgatgacgacgataggggggatgatggcggcgagagcccctcaatggccaaagttactcgcatcaacactagttcttccgcagatagaggctccaagcgtactcctttaagacgtcataattcattacaaccggaaaaaggtgtaacaggattttcctcgacttcatcgaaattacgcagaagatcagacaatactctgccagcaagttatcctttaaatgcagaagcaggagggaatggcagcgactatttctcaaacagatcaaactcgcatgcatcatccaggaagtcgtcatttggctccactgggaatacagcttatagcacaccactgcattcacctgcgttaagaaaaatgagctcgagggacaacgacgatagcggagacaacgtcaacggtagaggcacctcacctatccctaatctaaacatagacaagccttcgccgtcagcgtcgtcagcgtcaaaaagagaatatttaagtgcatatccaacactagctcacagagattcatcatcttcacttagtccgcggggcaaaggacaacggtcttcatcgtcttccagttccagtcaaagaatatatgtttccccaccatctcccacaggtgatttcgtacacgggagttgtgcagacggtgataatggatctaggactaatactatggtcgaaatgaaaaggaaaaaaccagttcgtccagtggacatagatgaaattatccagagattactagatgccggctatgccgcaaagaggaccaagaatgtttgcttaaagaattccgagattattcaaatttgccataaggctcgtgaattattccttgcccaacctgctctcttagaattatctccctcggtaaaaatagtgggtgatgttcacggccaatatgcagatcttttgagactttttaccaaatgcggtttcccccccatggcaaattacttatttttaggcgattacgtagatcgcggtaagcagtccctggagaccattttactattactatgctataagattaaatatcctgaaaatttcttcctcttaagaggcaatcatgaatgtgccaatgttacaagagtctacgggttttatgatgaatgtaaacgacgttgtaatatcaagatttggaaaacctttgttgacacgttcaacacgctaccgttagcagccatcgtcacaggaaaaatattttgtgttcatggtggactatcacctgttctaaattccatggacgaaattaggcacgttagtaggcccaccgatgtacccgacttcggcttaattaatgaccttttatggtcggatcctacagattcatcgaatgaatgggaggataatgagcgtggagttagtttttgttacaataaagtggctattaataaatttttaaacaaattcggattcgatttagtgtgtagagcacatatggtggtggaagatggttatgaattctttaatgacagaagcttagttacagtgttttcggctcccaactattgtggtgaattcgataactggggtgctgtcatgaccgttagtgaaggcctactctgttcttttgagttgttggacccactggacagtaccgctttgaaacaagtgatgaaaaaaggcaggcaagaacgtaaattagccaatcgctga

SEQ ID NO: 276 - protein, 710 aa, Saccharomyces cerevisiae
MGNSGSKQHTKHNSKKDDHDGDRKKTLDLPPLTKSDTTHSLKSSRSLRSLRSKRSEASLASNVQAQTQPLSRRSSTLGNGNRNHRRSNNAPITPPNNHYLTSHPSSSRRLSSSSRRSSMGNNNNSELPPSMIQMEPKSPILKNSTSMHSTSSFNSYENALTDDDDDRGDDGGESPSMAKVTRINTSSSADRGSKRTPLRRHNSLQPEKGVTGFSSTSSKLRRRSDNTLPASYPLNAEAGGNGSDYFSNRSNSHASSRKSSFGSTGNTAYSTPLHSPALRKMSSRDNDDSGDNVNGRGTSPIPNLNIDKPSPSASSASKREYLSAYPTLAHRDSSSSLSPRGKGQRSSSSSSSSQRIYVSPPSPTGDFVHGSCADGDNGSRTNTMVEMKRKKPVRPVDIDEIIQRLLDAGYAAKRTKNVCLKNSEIIQICHKARELFLAQPALLELSPSVKIVGDVHGQYADLLRLFTKCGFPPMANYLFLGDYVDRGKQSLETILLLLCYKIKYPENFFLLRGNHECANVTRVYGFYDECKRRCNIKIWKTFVDTFNTLPLAAIVTGKIFCVHGGLSPVLNSMDEIRHVSRPTDVPDFGLINDLLWSDPTDSSNEWEDNERGVSFCYNKVAINKFLNKFGFDLVCRAHMVVEDGYEFFNDRSLVTVFSAPNYCGEFDNWGAVMTVSEGLLCSFELLDPLDSTALKQVMKKGRQERKLANR

SEQ ID NO: 277 - DNA, 846 bp, Saccharomyces cerevisiae
atgagtaatcattctgaaatcttagaaaggccagaaacaccatatgacataacttatagagtaggtgtggcggaaaataaaaactcgaaatttcggaggacaatggaagatgttcatacgtatgttaaaaactttgcttcaagattagattggggatatttcgcggtgtttgatggacatgctgggattcaggcctccaaatggtgtggtaaacatcttcatacaattatagagcaaaacattttggcagatgaaacacgagatgttagagatgtattgaacgattcattcctagccattgacgaagaaattaatacaaaacttgtaggaaatagtggatgtactgctgctgtttgcgtattacgttgggagcttccggattcagtttctgatgattcaatggatttagcccaacaccaaagaaagttatatacagcaaatgttggtgattctcgaatagtattgtttagaaacgggaacagcataagactgacttatgatcataaggcatctgacactttggagatgcagagagttgaacaagcaggtggcctgataatgaaaagtcgtgtaaatggtatgctggcagtgacgagatcgttaggggataaattttttgatagtttagtagtgggcagcccatttaccacgagcgtagaaataacttctgaggacaaatttttaatcctagcgtgtgatggattatgggatgttattgatgatcaagatgcatgcgaattaatcaaggatattactgaacctaatgaagctgcaaaagtcttggttagatatgctttggaaaatggcacaacagataatgtaacggtcatggttgtcttcctctaa

SEQ ID NO: 278 - protein, 281 aa, Saccharomyces cerevisiae
MSNHSEILERPETPYDITYRVGVAENKNSKFRRTMEDVHTYVKNFASRLDWGYFAVFDGHAGIQASKWCGKHLHTIIEQNILADETRDVRDVLNDSFLAIDEEINTKLVGNSGCTAAVCVLRWELPDSVSDDSMDLAQHQRKLYTANVGDSRIVLFRNGNSIRLTYDHKASDTLEMQRVEQAGGLIMKSRVNGMLAVTRSLGDKFFDSLVVGSPFTTSVEITSEDKFLILACDGLWDVIDDQDACELIKDITEPNEAAKVLVRYALENGTTDNVTVMVVFL

SEQ ID NO: 279 - DNA, 2253 bp, Saccharomyces cerevisiae
atggatcgcatagcacagcaatatcgtaatggcaaaagagacaataacggcaatagaatggcttcttccgctatatcggaaaagggccacatacaagtcaatcaaactagaacacctggtcaaatgcccgtctatagaggtgaaactataaatctgtctaaccttccccaaaatcaaattaaaccgtgcaaagatttggacgacgttaacatacggcggaacaactctaataggcattctaaaatacttttactagatctgtgcgctggccccaataccaactcatttttaggcaataccaatgctaaggatatcacagttttatcgttgccgctacccagcactttggtgaaaaggtcgaactacccgttcgagaacttactaaagaattaccttggatctgatgaaaagtatattgagttcacaaagatcatcaaagattatgatattttcattttcagtgattcgtttagcagaatttcgagttgtttaaagacaactttttgcctcattgagaagtttaaaaagttcatctgccatttttttccatctccttatttgaaattctttcttctcgaaggctctctgaatgatagcaaggccccctcattaggaaaaaataagaaaaattgcatcttgcccaaattggatttgaacttgaatgtaaacttaacttcaaggtcaactttaaatttaagaataaacatacctccacccaatgattcaaataaaatatttttacagtctctgaaaaaggatctaattcattattctcctaattctttgcaaaagtttttccaattcaatatgcctgctgacttagcacctaacgacacgattttaccgaattggctaaaattctgctccgtaaaagaaaatgaaaaggtaatattaaagaaactctttaacaattttgaaactttagaaaattttgaaatgcaaagattagagaaatgcctgaaattcaagaaaaagcctttacatcaaaagcagctatcacaaaagcagaggggtccgcaatccacggatgattcaaaattatattctttaactagtttgcaacgacagtataaaagttctttgaaaagcaacatacagaaaaatcaaaagctaaaattaattataccaaaaaacaacacatcttcttcgccatcaccattatcttccgatgatactataatgtcaccaataaatgattacgaacttactgaaggaattcagtcttttactaagaatagatattctaatatcttaccttacgaacattcaagagtaaagttacctcactccccgaaaccacctgcagtttctgaagcatccacaaccgaaactaaaacagataagtcatatccgatgtgtcccgtagatgcaaaaaaccactcctgcaaaccgaacgactatatcaatgcgaactatttgaagctcacgcaaattaatcctgatttcaagtatattgctacccaagctccgcttccttctacgatggatgatttttggaaggttattactttaaataaagttaaagtaataatatcattgaattctgacgatgaattgaatttaagaaaatgggatatttactggaataatctgtcatattccaaccacactatcaaacttcagaacacctgggagaatatttgcaatattaatggctgtgttctcagagtctttcaagtcaagaaaacagctccacaaaatgataatatcagtcaagattgtgaccttccgcataatggtgaccttacttccattaccatggctgtatccgagccgtttattgtttaccaattacaatacaagaattggttagattcatgcggcgtagatatgaatgacatcattaaactacacaaagtcaaaaattcgttattgtttaacccgcaaagttttattacaagcctcgaaaaggatgtttgcaagcctgatttgatagatgataataatagtgagttacatctcgatacagcaaattcatcgccactattagtccattgttctgcagggtgtggaagaacaggtgttttcgttaccttggatttcctactaagtattctttcacctacaacaaatcactcaaacaagattgatgtttggaatatgactcaggaccttatctttatcatagtgaatgaattaagaaagcaaaggatttcaatggtacagaatctaactcaatatatcgcttgttatgaggcattattaaattattttgccctgcaaaagcagataaagaacgcgttaccttgttaa

SEQ ID NO: 280 - protein, 750 aa, Saccharomyces cerevisiae
MDRIAQQYRNGKRDNNGNRMASSAISEKGHIQVNQTRTPGQMPVYRGETINLSNLPQNQIKPCKDLDDVNIRRNNSNRHSKILLLDLCAGPNTNSFLGNTNAKDITVLSLPLPSTLVKRSNYPFENLLKNYLGSDEKYIEFTKIIKDYDIFIFSDSFSRISSCLKTTFCLIEKFKKFICHFFPSPYLKFFLLEGSLNDSKAPSLGKNKKNCILPKLDLNLNVNLTSRSTLNLRINIPPPNDSNKIFLQSLKKDLIHYSPNSLQKFFQFNMPADLAPNDTILPNWLKFCSVKENEKVILKKLFNNFETLENFEMQRLEKCLKFKKKPLHQKQLSQKQRGPQSTDDSKLYSLTSLQRQYKSSLKSNIQKNQKLKLIIPKNNTSSSPSPLSSDDTIMSPINDYELTEGIQSFTKNRYSNILPYEHSRVKLPHSPKPPAVSEASTTETKTDKSYPMCPVDAKNHSCKPNDYINANYLKLTQINPDFKYIATQAPLPSTMDDFWKVITLNKVKVIISLNSDDELNLRKWDIYWNNLSYSNHTIKLQNTWENICNINGCVLRVFQVKKTAPQNDNISQDCDLPHNGDLTSITMAVSEPFIVYQLQYKNWLDSCGVDMNDIIKLHKVKNSLLFNPQSFITSLEKDVCKPDLIDDNNSELHLDTANSSPLLVHCSAGCGRTGVFVTLDFLLSILSPTTNHSNKIDVWNMTQDLIFIIVNELRKQRISMVQNLTQYIACYEALLNYFALQKQIKNALPC

SEQ ID NO: 281 - DNA, 2787 bp, Saccharomyces cerevisiae
atgaaggacagtgtagactgcccaagcattctacccaccgaccgcacttcagtgctttccgagactagcactttggtcggatcgagttcgcatgtatattcgaggcatgctcctatgaacagttatcataacagcatgaacagcaacatataccacagccccaaagccagtagccctttggtgagctataagacatcttcgccggtgttattgaagagggcgaccgctcctgtcctgccaagcttcaagcccaaggaacagcgatataataagccgcagggttgttcgctaattactgctgtagaactgggcaagattattgaaaccttaccagatgaaaaggtgctcttacttgatgttaggccgtttaccgaacatgccaaatccattatcacaaactccattcatgtatgtttgccttccacgctgctgaggaggaaaaatttcaccttttccaaactcttggacaacttaactcctagcgagcaaagcgtgttgaaatctaaactggccatcgataaccttcggattatcatttatgatagcaccgcaaatcaaacggaaagttctgtttctttaccttgttatggaatagcgtccaagctaatagagtttgatactaatgttaaaaaaaccgtgtctatactaatgtgtggttttcctcaattcaaaattctatttccagaccatataaacaccaacacatttaactcagattgcattagttcggctgaacctaaaagccccaagacaaaccttatgaacagtctacacaacacagcgccgcatatgacggcgacaacaccactatcgtctccgcaaatgaaccttaagttgaaagttcctgacgatagtaggtcagatcattcaaacttttccagttctccctctccgcgtaacgtcctatcagattctcccatgtcttcttcttcccccatatctgccttatttaagttccagctgcctgcaccacaaacaaacataaaccaaatgttcaaattttcgcaaaatgaagaaataatgggtttagagacgtatttgagtgcagtcaacatcaaagaagaacatgaaagatggtataataacgattctgccaaaaaatctttacaaaacttccaattcccaaagaaccaaaattctctagaaaaggacactaataaagacaaactagggtttcagatcagatacgaaaacctgagcaaaaattacgaaaaggaggtcattgactccgttatacctgaatggttccagcatctgatgtcaatacccaagatcgagttggtttctcagtttcaaaaattagattttttggaaaaaaggcgcttgaaccattctgtctctttcaggaagaaggaaaactcgtttatacttgaaaagccatcatcatatcctgaacagttaacatcaacttcttcttcaacaatcatgcctccaaaatttcctgacgtgaacaaagtacaaaagaggtcgcattctcagccaatcttcactcaatacagtaaatataaatcgatgctcagccttgaatcagattccgattcggagtcagatgacgttataatatcatcaggcgttgaattaggagccaagaacaggtacaaggatatttttccctacgagcattcgagagtgattctaaaaaaaggtttgcaatcatcaaaaggtatcaagcattcacattctacttccgatggtggcatcctcgacaattatatcaacgcaaactatttgtctctgccaaggttttctgtagagcaaaattcgtcatttcaaacaactacaaccacaacaagaagagtgcgctatatagcgacgcaagctccaatgccctccactgtacatgacttttatacatgcatattgaataatggcgttccgttggttctctcattgacaaatgatttcgaaaatggcattgagaaatgttatcgatattggcaagaaggtaattataacggtattcacgttaaattgttagaaaaaaaaatattaaagatgcctagcactactagcatgaggaaaaatactatgggaacacaaaatagtagtttatattcagctggtgttcagggaaatagtagtaactatagtactgataatgataatgataatgacaacaataataataacaataacaatagtaatattcctgttactgctgctgcttgtgatgatgatgatgatgatgatgatgacgcaattctcataagacaaattctgctaacatatcatgatcaagagaaaccttatgaattgttacagattcaggtgaaaaattggcctgatttgggcactttactcaatcctatctcaatcttacaagcaatcaatgtcaagaatcacataatagatacactatttgccagaaattactatcaaaacgaccaacttcctaccattttggttcattgttccgcaggttgtggaaggactggtactttgtgtaccattgattccattctatccaatttcgaaatgtttgaaatgttgcagaaagagtttgttaaattaaaatacccggcaaagttattcgatccaatttcatggacaattaatatttttagaaaggaacgaatatccatggtccagaacattaatcaatttattttcatttatgactgcttgctattttactttagattacgtcttgatgacataacagagagaacggatggtgatggaagtaacaaggacaatatatcattaagtgcattaattgaacaaatcgaaaaattagagatcttgcagacattcgtggatgataagttgaaagaattgccacaatag

SEQ ID NO: 282 - protein, 928 aa, Saccharomyces cerevisiae
MKDSVDCPSILPTDRTSVLSETSTLVGSSSHVYSRHAPMNSYHNSMNSNIYHSPKASSPLVSYKTSSPVLLKRATAPVLPSFKPKEQRYNKPQGCSLITAVELGKIIETLPDEKVLLLDVRPFTEHAKSIITNSIHVCLPSTLLRRKNFTFSKLLDNLTPSEQSVLKSKLAIDNLRIIIYDSTANQTESSVSLPCYGIASKLIEFDTNVKKTVSILMCGFPQFKILFPDHINTNTFNSDCISSAEPKSPKTNLMNSLHNTAPHMTATTPLSSPQMNLKLKVPDDSRSDHSNFSSSPSPRNVLSDSPMSSSSPISALFKFQLPAPQTNINQMFKFSQNEEIMGLETYLSAVNIKEEHERWYNNDSAKKSLQNFQFPKNQNSLEKDTNKDKLGFQIRYENLSKNYEKEVIDSVIPEWFQHLMSIPKIELVSQFQKLDFLEKRRLNHSVSFRKKENSFILEKPSSYPEQLTSTSSSTIMPPKFPDVNKVQKRSHSQPIFTQYSKYKSMLSLESDSDSESDDVIISSGVELGAKNRYKDIFPYEHSRVILKKGLQSSKGIKHSHSTSDGGILDNYINANYLSLPRFSVEQNSSFQTTTTTTRRVRYIATQAPMPSTVHDFYTCILNNGVPLVLSLTNDFENGIEKCYRYWQEGNYNGIHVKLLEKKILKMPSTTSMRKNTMGTQNSSLYSAGVQGNSSNYSTDNDNDNDNNNNNNNNSNIPVTAAACDDDDDDDDDAILIRQILLTYHDQEKPYELLQIQVKNWPDLGTLLNPISILQAINVKNHIIDTLFARNYYQNDQLPTILVHCSAGCGRTGTLCTIDSILSNFEMFEMLQKEFVKLKYPAKLFDPISWTINIFRKERISMVQNINQFIFIYDCLLFYFRLRLDDITERTDGDGSNKDNISLSALIEQIEKLEILQTFVDDKLKELPQ

SEQ ID NO: 283 - DNA, 2940 bp, Saccharomyces cerevisiae
atggtgaccgaccaaggcagtaggcattcgatacaatctaagcaaccagcctacgttaataaacaaccgcaaaaaaggcagcagagatcttctgtcgcatgcctttcttgtaggaaacgtcatataaaatgtcctggtggtaacccttgccaaaaatgtgttacgagcaatgccatatgtgagtacttggagccgtcaaaaaaaattgttgtgtcgacaaagtatctgcaacaactgcaaaaagacttgaatgataaaactgaagagaataaccgcctgaaagctttgctcttggagagaccagtgagtgtacgtggtaaggataacagcgatgatgacgagaggcatataaacaatgcaccctcaagtgacacattggaagtatccagcgctccggcggctcctatatttgacctcatgtccaatagtaacactgcgtccgataacgataacgacgatgacaacagcaacagaatcacaaataataggagctatgatcatagtttggaaaaatactacaaaaaggccatcagcatctttaaacaaccagctaatgctaatggcgaaaatggcaacggtgccaatggtcatgaggatgatgatgaagatgatgaagaaatatcaacaaattttgctcaaagaagtggtaggctcatagaatctcacaatggattccattattttgttggatcttcttcaatgacattatttgggttagaaattcaatctttggttacaaagtatatttcggtcaagaattttcgacctttgccaataaacaccaaaaacaagattttaaattcaaacctgaacccggctataagttcttttatcaattcaaacaactatcttttctcgtcctataattttttgaaccctatatcgactattgtcaacttaaactcaatcaacgataatttatctccattgatgtttaagataattttgaaaagcgatacggatggtagtagtggccaggaagaggtaatacagtttcagttgccttcgtataattacacaaaactattaattgactgctttataaattataacgatggttgtttttactttttcaacgaaggcctggttaaatgtggcattaacaaattgtacttggaaaataaatggctatactatgataataccaaaaaagctttggacaatgagaatgatccaattttacaagctgtttggttttgcaaaattttgttaattttagcagtaggtgaaatgtatctgggttccatcaataatgaaatgttgaagaattattctaatcagccaaaattgcccggttcaaaattttttcaaatgggttctaaaatttttaattgtttgttctcaagtgaaagattagaaaatgtgactaagaaaggcggtattgaagtcctgttgttatacgcgttcttcttacaggtggctgattacactttagcctcttatttttacttcggtcaagccctaaggacgtgcttaattctaggcttacatgttgattctcaaagcgacactctatccaggtatgaaatcgagcatcataggagactttggtggacagtttacatgtttgaacgaatgcttagctcaaaagctgggttaccattaagtttcactgattatacaatctctacagcactgccagcggatattgatgatgaaactatcgaagagaaaaatagtcactatgttttcagaaaggcagaattgatttctaactgcgttactattgtgaaaatcaatgcacaaattttgagcaaattatatcaaaggcaacctgagacaaacatcataattactttgaaagttgtcatcaagcagttgttggaatggaggaacaatttgtccgattccttacaggtggattttacgcaaaaggatgaagatttcaaaatatcgagattgtcaaccaatatgtttacggaatattttcaaggaataaacttggccgtgagacctttattatttcattttgcatccattcaattgaaaaggttcaaaacgagcaatactttcgtcaacttacaaaactattctgccacaatatcttccttattaacatgttctttgcatgcttctgtgaatactattaggtctctgtggagtttattacagaatagtatgcttgctatgtttagttatatggacagagagtatctttttacttcttcttgtactttattactattcaacactgcttttggtattcatgaacaaacactatatcatttggatcattctctggaaattttcacacaaatgagaaacttaggcaacattccagcaggcttaagaagagcacaattattaacattaatggcaaatttggatttccacggcataatgaatgacttgattactaaatataacgatattttgaaatttgattctatgaattgtgaaaacgataacatagtagaagatagcaatgaacccaaaagagaaaccgaaaagtgtaaacctcacaaagatggcgatcgcattgacccttcaattatagactgtgataaatcaaacaccaatacaaatatgatcaagaacgaatctatatcgaacattgttagcatacttccggaaggcgcgaaaccaacgctgactgattatagtaatggtaataatgatgttaatgatattaacgtcaataactcggaaccttctactttttttgatatcataactgcgagcttggaaaattcataccaaaccacgctaactgaaaagggctctcaggtgatggaaaaaaacatggatcagttggattccgttcataatctaaatgatgacgatttacaacaattgttggaggatttaggcaatattgatcattccgatgaaaaactttggaaggaaatcactgatcaagcaatgtggctgggaaatactatggatccaactgcagctgctggtagtgaaattgactttactgattatttaggaccataa

SEQ ID NO: 284 - protein, 979 aa, Saccharomyces cerevisiae
MVTDQGSRHSIQSKQPAYVNKQPQKRQQRSSVACLSCRKRHIKCPGGNPCQKCVTSNAICEYLEPSKKIVVSTKYLQQLQKDLNDKTEENNRLKALLLERPVSVRGKDNSDDDERHINNAPSSDTLEVSSAPAAPIFDLMSNSNTASDNDNDDDNSNRITNNRSYDHSLEKYYKKAISIFKQPANANGENGNGANGHEDDDEDDEEISTNFAQRSGRLIESHNGFHYFVGSSSMTLFGLEIQSLVTKYISVKNFRPLPINTKNKILNSNLNPAISSFINSNNYLFSSYNFLNPISTIVNLNSINDNLSPLMFKIILKSDTDGSSGQEEVIQFQLPSYNYTKLLIDCFINYNDGCFYFFNEGLVKCGINKLYLENKWLYYDNTKKALDNENDPILQAVWFCKILLILAVGEMYLGSINNEMLKNYSNQPKLPGSKFFQMGSKIFNCLFSSERLENVTKKGGIEVLLLYAFFLQVADYTLASYFYFGQALRTCLILGLHVDSQSDTLSRYEIEHHRRLWWTVYMFERMLSSKAGLPLSFTDYTISTALPADIDDETIEEKNSHYVFRKAELISNCVTIVKINAQILSKLYQRQPETNIIITLKVVIKQLLEWRNNLSDSLQVDFTQKDEDFKISRLSTNMFTEYFQGINLAVRPLLFHFASIQLKRFKTSNTFVNLQNYSATISSLLTCSLHASVNTIRSLWSLLQNSMLAMFSYMDREYLFTSSCTLLLFNTAFGIHEQTLYHLDHSLEIFTQMRNLGNIPAGLRRAQLLTLMANLDFHGIMNDLITKYNDILKFDSMNCENDNIVEDSNEPKRETEKCKPHKDGDRIDPSIIDCDKSNTNTNMIKNESISNIVSILPEGAKPTLTDYSNGNNDVNDINVNNSEPSTFFDIITASLENSYQTTLTEKGSQVMEKNMDQLDSVHNLNDDDLQQLLEDLGNIDHSDEKLWKEITDQAMWLGNTMDPTAAAGSEIDFTDYLGP

SEQ ID NO: 285 - DNA, 930 bp, Saccharomyces cerevisiae
atgcagggaaataaatcaactataagagagtataagatagtagttgtcggtggaggtggcgttggtaaatctgctttaacaattcaattcattcaatcatactttgtggacgaatatgaccctactatcgaagattcttacagaaaacaagttgtcatcgatgacaaagtatccattttggacattctagatactgctggacaagaagagtattctgcgatgagagaacagtacatgaggactggggaaggtttcctactggtctattccgtcacctctagaaattcctttgatgagttactgtcttattatcagcaaattcaaagagtaaaagattctgactacattcctgtagtcgtggtaggtaacaaattggaccttgaaaatgaaagacaagtctcttatgaagacgggttacgcctggccaagcagttgaatgcaccctttctagaaacgtctgcgaaacaagccatcaacgtagacgaggccttttatagccttattcgtttggtaagggacgacggtgggaaatacaatagcatgaatcgtcaactggataatacgaatgaaataagagattcggagctaacctcatctgcaacagcggatagagaaaaaaagaacaacgggtcttatgtactcgataattctttgaccaatgctggcactggctccagttcaaagtcagccgttaaccataacggtgaaactactaaacgaactgatgaaaagaattacgttaatcaaaacaataacaatgaaggaaataccaagtactccagtaacggcaacggaaatcgaagtgatattagtcgtggtaatcaaaataatgccttaaattcgagaagtaaacagtctgctgagccacaaaaaaattcaagcgccaacgctagaaaagaatctagtggtggttgttgtataatttgttga

SEQ ID NO: 286 - protein, 309 aa, Saccharomyces cerevisiae
MQGNKSTIREYKIVVVGGGGVGKSALTIQFIQSYFVDEYDPTIEDSYRKQVVIDDKVSILDILDTAGQEEYSAMREQYMRTGEGFLLVYSVTSRNSFDELLSYYQQIQRVKDSDYIPVVVVGNKLDLENERQVSYEDGLRLAKQLNAPFLETSAKQAINVDEAFYSLIRLVRDDGGKYNSMNRQLDNTNEIRDSELTSSATADREKKNNGSYVLDNSLTNAGTGSSSKSAVNHNGETTKRTDEKNYVNQNNNNEGNTKYSSNGNGNRSDISRGNQNNALNSRSKQSAEPQKNSSANARKESSGGCCIIC

SEQ ID NO: 287 - DNA, 969 bp, Saccharomyces cerevisiae
atgcctttgaacaagtcgaacataagagagtacaagctagtcgtcgttggtggtggtggtgttggtaaatctgctttgaccatacaattgacccaatcgcactttgtagatgaatacgatcccacaattgaggattcatacaggaagcaagtggtgattgatgatgaagtgtctatattggacattttggatactgcagggcaggaagaatactctgctatgagggaacaatacatgcgcaacggcgaaggattcctattggtttactctataacgtccaagtcgtctcttgatgagcttatgacttactatcaacagatattgagagtcaaagataccgactatgttccaattgtggttgttggtaacaaatctgatttagaaaacgaaaaacaggtctcttaccaggacgggttgaacatggcaaagcaaatgaacgctcctttcttggagacatctgctaagcaagcaatcaacgtggaagaggcgttttacactctagcacgtttagttagagacgaaggcggcaagtacaacaagactttgacggaaaatgacaactccaagcaaacttctcaagatacaaaagggagcggtgccaactctgtgcctagaaatagcggtggccacaggaagatgagcaatgctgccaacggtaaaaatgtgaacagtagcacaactgtcgtgaatgccaggaatgcaagcatagagagtaagacagggttggcaggcaaccaggcgacaaatggtaagacacaaactgatcgcaccaatatagacaattccacgggccaagctggtcaggccaacgctcaaagcgctaatacggttaataatcgtgtaaataataatagtaaggccggtcaagtttcaaatgctaaacaggctaggaagcagcaagctgcacccggcggtaacaccagtgaagcctccaagagcggatcgggtggctgttgtattataagttaa

SEQ ID NO: 288 - protein, 322 aa, Saccharomyces cerevisiae
MPLNKSNIREYKLVVVGGGGVGKSALTIQLTQSHFVDEYDPTIEDSYRKQVVIDDEVSILDILDTAGQEEYSAMREQYMRNGEGFLLVYSITSKSSLDELMTYYQQILRVKDTDYVPIVVVGNKSDLENEKQVSYQDGLNMAKQMNAPFLETSAKQAINVEEAFYTLARLVRDEGGKYNKTLTENDNSKQTSQDTKGSGANSVPRNSGGHRKMSNAANGKNVNSSTTVVNARNASIESKTGLAGNQATNGKTQTDRTNIDNSTGQAGQANAQSANTVNNRVNNNSKAGQVSNAKQARKQQAAPGGNTSEASKSGSGGCCIIS

SEQ ID NO: 289 - DNA, 930 bp, Saccharomyces cerevisiae
atggcgagtgtaccaagtctatgcgacatactgataccgctagaaaagaatagtcgcagcgacggcgatgctgaaagtagcaatacagtgctgattcaactgcgaaaagggcatcacgaacggatgcgttctccttacacaatacaaaagttttacaaatttctaaaaagagctcattgtgaggaaaatttagaatttttcgaaaaagctcatcagttcctccagcttaagcaaaacaggagtattagcgaggagaagctcttggaagtttggaacaagtcgttgtacataaaatacattgccgtggactcccccaaagaatgcaacttttcacaggatactagggagatatttgagaagtgctttgctaacaatgaagtacctgccgacgtagacgtcctgtgtgccattagccatgtgatgggcctattaatggacgggtatcaccgatttgtgagttctgttaatgagaaaaagtactccgccacatatgcccacaatgactctgctacggaacaagatctcaaaaacgagtctacaacttctttttcgtcattaggcgtggaggatatttctgaagatagaaattcgtatcttaagaagcctgatatcaatggtttgtcaactatcattcaagaaacgtctgcaaacacgaccaatgagtcgcaatgcagcgatcgcacttctcggccaagcgagtcctcttcctcactcaacactaccagctcgacctacaagaataccagcactagaaatctgcaaaaaccgcaaaatacaggaattctcaactcggggaaaggtttattgcaaaaacttaactttgttaaaaaacggaaatctttcaaacagccttcaggcgtcatttgtagccattataacagcaatgttcaaaaccgtttgaaaggacaaaacagtcatcaacaaagatag

SEQ ID NO: 290 - protein, 309 aa, Saccharomyces cerevisiae
MASVPSLCDILIPLEKNSRSDGDAESSNTVLIQLRKGHHERMRSPYTIQKFYKFLKRAHCEENLEFFEKAHQFLQLKQNRSISEEKLLEVWNKSLYIKYIAVDSPKECNFSQDTREIFEKCFANNEVPADVDVLCAISHVMGLLMDGYHRFVSSVNEKKYSATYAHNDSATEQDLKNESTTSFSSLGVEDISEDRNSYLKKPDINGLSTIIQETSANTTNESQCSDRTSRPSESSSSLNTTSSTYKNTSTRNLQKPQNTGILNSGKGLLQKLNFVKKRKSFKQPSGVICSHYNSNVQNRLKGQNSHQQR

SEQ ID NO: 291 - DNA, 630 bp, Saccharomyces cerevisiae
atgtcacaacaagttggtaacagtatcagaagaaagctggtaatcgttggtgatggtgcctgtggtaagacatgtttattaatcgtcttttccaagggccaatttccagaagtctacgtaccaactgtctttgaaaactatgtagcagatgttgaagttgatgggcgtcgtgtagagctagcgctatgggataccgctggtcaagaagattatgatagactaagaccattgtcatacccagactccaatgtcgtattaatttgtttctctatcgatcttccagattctttagagaatgtacaagaaaaatggattgccgaagtattacatttctgtcaaggtgtgccaattattcttgttggttgtaaagtggatttgagaaacgacccacaaaccattgaacaattaagacaagaaggtcaacaacccgttacatcacaggagggacaatctgtagcagaccagattggcgcaaccggatactacgaatgttcggccaagactggttatggtgtcagagaagtgtttgaggccgccactagagcttcattgatgggtaaatctaaaacgaatggtaaagctaagaagaacactactgaaaagaagaagaagaagtgtgtcttgttatag

SEQ ID NO: 292 - protein, 209 aa, Saccharomyces cerevisiae
MSQQVGNSIRRKLVIVGDGACGKTCLLIVFSKGQFPEVYVPTVFENYVADVEVDGRRVELALWDTAGQEDYDRLRPLSYPDSNVVLICFSIDLPDSLENVQEKWIAEVLHFCQGVPIILVGCKVDLRNDPQTIEQLRQEGQQPVTSQEGQSVADQIGATGYYECSAKTGYGVREVFEAATRASLMGKSKTNGKAKKNTTEKKKKKCVLL

SEQ ID NO: 293 - DNA, 1878 bp, Saccharomyces cerevisiae
atggtgccattggaagatctgcttaataaagaaaatggcactgccgcacctcaacacagccgggagagtatagtagaaaatgggacagacgtttctaacgtcacaaagaaggacgggctgcccagtcctaacctatctaaaaggtcttctgattgttcgaagaggcctagaattaggtgtaccacggaagctattggcttgaacggtcaagaagatgaacggatgtcaccaggcagcacttcttcatcatgcttaccatatcatagtacttcacacttgaacactcctccatacgatctattgggcgcttcggcagtttcacccaccacatcatcttcctctgactcgtcctcctcctcgccattggcacaagcgcataacccggcaggtgatgacgacgatgcggataatgacggtgattctgaggatataacactatattgtaaatgggacaactgtggtatgattttcaaccaaccagagctgctatataatcatctgtgtcatgaccatgttggcaggaagtcacataagaacctacaattgaattgtcattggggagactgtaccacgaagacggagaaaagggaccatatcacctcgcatttgagagttcacgtaccattgaaaccgttcggttgctctacgtgctccaaaaagtttaaacgtccgcaagatttaaaaaagcatttgaaaattcatctggaaagtggcggtattttgaaaagaaagaggggacccaaatggggctcaaaaagaacttctaagaaaaacaaaagttgtgcaagcgacgcagtgtcgtcttgttctgcatctgtgccttccgctatagctggtagctttaagtcacattctacttctccacagatattacccccattgcccgtgggtatatctcaacatctgccttcacaacagcagcagcgggctatttccttaaaccaactatgctcagacgagctatctcagtataagccggtatattctccacaattgagtgccagattgcaaacgatcttgccgccattatactacaataacggcagcacggtaagccaaggtgccaacagtcggagcatgaatgtctacgaggacggttgttctaataagaccatagcaaacgccacccaattcttcaccaaactatcgagaaatatgacaaataactacattttgcaacaaagcggtggtagtactgagtcctcgtcatcatctgggcgcatccccgtagcacaaacaagctatgtgcagccacctaatgctccttcataccaatccgtacaaggtggtagctctatttcggccactgcaaatacagcaacttatgtgccagtacggttggccaagtatccaactggtccttcgcttactgaacatttgccacctttacattcgaacactgccggtggtgttttcaaccgccaatcacagtatgctatgccacactatccatctgttcgtgctgcgcctagctattcctccagtggctgttctatattaccgcctctacaatcaaagataccaatgttaccatcgcgccgtacaatggcaggtggaacttcattgaagcctaactgggaatttagcctgaaccaaaaaagctgtactaatgatattatcatgagtaagctggcgattgaagaagtagatgacgaaagcgagatagaggatgatttcgtagagatgttgggtatagtgaacattatcaaggactacttgttgtgctgtgtcatggaagatttagatgatgaagaaagtgaggacaaagatgaagaaaacgcattcttgcaagaatctttagaaaaattgagtttacaaaaccaaatgggaactaactcagttcgcatcttgaccaagtatcccaaaattttggtatga

SEQ ID NO: 294 - protein, 625 aa, Saccharomyces cerevisiae [sequence omitted]

SEQ ID NO: 295 - DNA, 2184 bp, Saccharomyces cerevisiae
atgaatgattggcatgagttcaatgccgcgataaagtcaatatattgtaatgcagaaggtgactcaagcagtataattaatagattggttggcttggcaatgaaaagcgaagattccacttttattgaggccgttttagttttgaaagaaaatgtgtcgaaagtagataaacaattaagatttttatggcttacttcaactattaattcaaggttttatccccctatacctatctcagaagcctcaccggtttcttggaataaaaccgaatattgcgcacctggtactgaagaactacaaaggcgttatccagggagagccaagttacagaatgaagaagactattcaggcggaatagaacaatgccgagatgtgccagattgctcattagttgcttctctaattaatcttaggtctaagaacttgaatctccctctaattaaacaaatatcatcaactaaatatcacgtcaatttaagttttaacggaagcaacaaaaggctagtgacagtagatatttcgcagatcccaacctcagtggatggcaaacaactttctttaaagagtaacgatatttcggacaaaattggagagcttgcattactgcttgtttctaaaggaacatattccacggatggctcaaatattagtatagatacttaccgcttaagtggcttcttaccagagataacacaagtaaacagctatcctttcgaaaaattatggaagtttcacaaatctaatttatgtctgatgggcgctggcaccgggaatcgttccaatgacatgataaagcccctagttgagaaccatgattactctataattgatatcacatatgattctaggctagtaaaattgcgagatccgaggaactcggcactaaatgttgaaatcagctatgaacagtatttaaaaaatttcaaacaactttatcttaattggaaccaagaaaaattattcaaacgttctcaggtacttcattttcggtacgatacttcacgctacaataaattttctatcgttgcagataaacctttatttcacctggtaaacaattctaaagtgacagagacggtatggttattgctagaatcccatttgcaagatgaaggcagccaagaaaatcggtcagtttcctttttgaatgaggctcccgaatgcataatttgtccaattgaacctccagtagaatgcggtggcaatcacattggacttcagctggtaaagttgagattagatgctgagactgagaggttattgtattgttattcaacaacaaacaacaatttcagtattcactctttctcagttgtgaaggaaatatgttttcaaagattgaaagatacaaaaagtctttttgccaaagtccttttctcttttccttatgaaatagagggaaaagcctcatttgatacttgtaatttttttcaaaatccgacttttgagttggaagttcactctgaacaagattatcaagtacttatggacgccgcatgtatctcaactagctcacatgatttaattaacatccaagtatattactttaatgactatgaattgataaagccaataatgtttgataaccactatcagcccgggcagggccttaaacaagacgtgcccatcttaactaatgtcaaatatatgattgtatgctcaacttacggccctccagcctcaacggaatttgaattacttgcctcgatacggttatcctcttcatggaggttaatatctggaataactttacggagtgttaacttgatatacggtacttatccatatcattgtcgcaacaggttccattggaaggaaacttcagacaaacttaaaattcagatgactttgccaaccaaaaagtattctacgaacaaactttttatacgtgtagtacccgtggaatcatcagcacgattaaggatgcgatgtaatattttcgagcctgaatcagctctctgtgtttatgaatgtcaagagtataggacatgtccatctgggggcatcgttatacctgatctggaagtctctcgtactaacattgttgtattgatgatagaaagaagtgtacctatttccagttgtttacctacggaaggacaattggatgaattggagttgtttgttgggtccagtcaaaaaatcagaattgaaaaatactccgatgatgtgataccaaaataa

SEQ ID NO: 296 - protein, 727 aa, Saccharomyces cerevisiae
MNDWHEFNAAIKSIYCNAEGDSSSIINRLVGLAMKSEDSTFIEAVLVLKENVSKVDKQLRFLWLTSTINSRFYPPIPISEASPVSWNKTEYCAPGTEELQRRYPGRAKLQNEEDYSGGIEQCRDVPDCSLVASLINLRSKNLNLPLIKQISSTKYHVNLSFNGSNKRLVTVDISQIPTSVDGKQLSLKSNDISDKIGELALLLVSKGTYSTDGSNISIDTYRLSGFLPEITQVNSYPFEKLWKFHKSNLCLMGAGTGNRSNDMIKPLVENHDYSIIDITYDSRLVKLRDPRNSALNVEISYEQYLKNFKQLYLNWNQEKLFKRSQVLHFRYDTSRYNKFSIVADKPLFHLVNNSKVTETVWLLLESHLQDEGSQENRSVSFLNEAPECIICPIEPPVECGGNHIGLQLVKLRLDAETERLLYCYSTTNNNFSIHSFSVVKEICFQRLKDTKSLFAKVLFSFPYEIEGKASFDTCNFFQNPTFELEVHSEQDYQVLMDAACISTSSHDLINIQVYYFNDYELIKPIMFDNHYQPGQGLKQDVPILTNVKYMIVCSTYGPPASTEFELLASIRLSSSWRLISGITLRSVNLIYGTYPYHCRNRFHWKETSDKLKIQMTLPTKKYSTNKLFIRVVPVESSARLRMRCNIFEPESALCVYECQEYRTCPSGGIVIPDLEVSRTNIVVLMIERSVPISSCLPTEGQLDELELFVGSSQKIRIEKYSDDVIPK

SEQ ID NO: 297 - DNA, 5313 bp, Saccharomyces cerevisiae
atgttcaatagaagtaacaccgcaggcggatctcaggctatgaaagagggacttggcataaacaagctctccccgatatcatcgaattcgaacccaagctcattgacttcctccaattatgaaaaatatctgcagctggccacagagaagaatccgtgtatgatcttggagctggaactggacggcaaggtgcgatatggctctccacagtggaacacgatcacaggagtcgccgatgatagtggctcttctccgacgtacattgcagaccttattctcggatccgatcaagataaaggtgtctttcaaaaggccacagacatgctgctcatgaatgatgacaccagttgcactataacgttcaagataaaggcagccgactatgaaggtagcgcaggctgtgacgatgaaagtacgataacgaccttggaagcacgtggtatcttaatcagggatggccacacacagttgccctctcacacgatgtggatagtcaagcctcgcacaaacgactggtcagacttttatgccaacgaagacgctcaagacgacatggtcatccagttatccgataattgcgacgatatcgatatccaacttcccgaagagttcgccaagacgcttgggttcggcgctaagatcttcgtgcagtacttgaagagaatacgactggaaatgataatagacgagttcaatctacctctgccaaaaatggaactatgccgggtctgtgagaactttgtccctgtttggtggttggagacccattcgcaaagttgcgtttgcgagcatagaacggaatcgctcatacaattactacacgataatcttcttgagcaacaggcgatcttggcaaacttcacgaaagattcagagtataagggcagtcagatacaggtacgttccaacaacttccttaaccaagttttagactccttaagagagctgtgtcaggacgccatagatatcaacccgagtgaaatggttcctgatctttaccacagtctttcaacatttcctcaagataatggtaataataacaataataataataataataataataataacaatgctttgttagatcaattccctatccaaaaagatacagttagcttgaattcatattttcagttttccccaaggactaaccacaacattcaaaacgtcacgtcgtggcaatcaagattttttctcaatgatgatcaggatcctggactagctcttttgattcacgatactctggacttggcaaggaaaaaagtggatgccgtgttgaggttggataacgcaatgacctattctttaaagattaaaaacgaggtcaacaactatgtggtacaactgatccgcgagcaaattgaaataaataagcatgcaatcctaactcacccaatgaatttaaggtcttcttccatatttcattccccactgccgcaaattcactctcaacaaccagaagccgagaatctcatatattcctcctctactcccctgcaagtccaacacgaccaatgtgcgtcctttgaagcaccctccaagtctcatctggagcctattcctttcccggtttcttccattgaagaaacaccaactgcaaatgatatcaggcatccttctcctttgccccgtagttgtagcaacaccgttatgaaactaccgacacctcgaaggaaacttgactcaaacggattattctctgatgcctatttaaacgctgacatcattccgaacccaagtatcgaatccacgatatctattgatagagataataacactaatagtaggggtagtagtatgaaacagtatggtattggtgaagccaccgactctcggactagtaactcggaaagaccttcttcctcttcgtcaaggctggggataagatcaagatccataacaccaagacaaaagatagaatactcacatgtagataatgatgaccgcaccaacgaaatgctgtctagagataaagattctcttcaacctcaaccttccgtagataccaccataacatcctctactcaggcgaccaccacgggtaccaagactaatagtaacaattccacaaactcagtattaccaaaactaatgacaagtatttccttgaccccaaggcgtggttcaccatcatttggtaatctcgcaagccattctatgcagcagacaaacagttttaaactgattcatgataaatcgccgatatcttcacctttcacattctccaaggattttttaaccccagagcagcacccttccaatattgccagaacagatagtatcaataatgcaatgttaacttcaccgaatatgccattatcaccccttttattggccacaaaccaaactgttaaatctccaacgcctagcataaaagattacgatatcttgaaaccaatcagcaaaggtgcttatggtagtgtttatctagcacggaaaaaactcacaggagattattttgctataaaggttctaaggaaatcagatatgattgccaaaaatcaagtaacaaatgtcaaatccgagagagcaatcatgatggttcaaagtgataagccctatgttgcgagactatttgctagtttccaaaataaagataaccttttcttagtgatggaatatttaccaggtggagatttggccactttaatcaagatgatggggtatctgcccgatcaatgggccaagcaatacctaaccgaaatcgttgtcggtgtgaatgatatgcatcaaaatgggatcattcatcatgacttaaagcctgaaaatctactaattgataatgcaggtcatgtgaaattaacagatttcggtttatcaagagctggtctgattcgccgtcacaagtttgtcccacataagtcgtcgctaagtatcagttccactttaccaatcgataacccagcaaataattttaccatgaacaacaacaatagtaatcattctcaattatcaaccccagatagcttcacatcagatcataagcagtataatagaagcaagaagtcatcactaggtcagcaatacgaacactcagaatactcaagtacttccaattcccactcaatgacgccaacgcccagtacgaacactgttgtttatccttcatattaccgtgggaaggacagatcacacggaagttcgaacatcgatctcccagcgtcccttagaagaagtgaatctcaattatcattttccctccttgatatttctcgttctagtactcctcctttagcaaatcccacaaattcgaacgctaataatattatgagaaggaaatcactcactgagaataaatccttttctaatgacctattatcttcagatgctatcgcagctaccaatacgaatattaactcgaataataacatttccctttcgccagcaccttcggatttagctttgttttatcctgatgatagcaagcaaaataagaaattttttgggactcccgattatctcgctccagaaactattgaaggaaagggtgaagataacaagcaatgcgactggtggtcagttggttgtatatttttcgaattacttttagggtatcctccattccatgcagaaacaccagatgctgtttttaagaaaattctatcaggagtcattcaatggccagagtttaaaaatgaagaagaagagcgagaattcctaacaccagaggcaaaagatttgatagaaaaattgttggttgtggatcctgcgaaaagactgggtgcgaaaggaattcaagaaattaaagatcacccttatttcaagaatgtggattgggatcatgtttacgatgaggaagcttcttttgtccctacaatagacaatccagaagatactgattattttgacctaaggggtgcagagctccaagattttggagacgatatcgaaaacgataatgccaatattttgtttggtaaacatggcattaacaccgatgtttctgaattatctgcagctaatctctctccaccattgaatcataaaaatattttatcccgtaaactatcgatgagtaacaccactaataggagctcaaataattccaacagtagcgtgcatgactttggtgcacatacaccggttaataaattaagtattgcttctgtattagagtcagtacctcaagaaacaggatatattacacctaacgggaccggtacaactactacaagtgccaaaaactcacccaatctgaagaatttgtcactggctatacctccacatatgagggatcgcagatcaagtaaattgaatgattcacaaacggaatttggttcttttaatttcaggaatttatcggctcttgataaagctaataaagatgctataaatagactgaaaagtgaacatttttctgaacaacctggggttcacagaagaacctcttctgcgtcactaatggggtcatcctcagacggatcagtgtcaactccagggagtaacgcttcaaacactacatctggtggcaagttgaaaatacataagcctaccatatccggttctccttcaacatttggcacatttcccaaaacatttttgaggtctgattcattctccacaagatcatattctcctgaacgaagtattagtatcgactcgtcaacattatcaaggaagggtagtataatcggggataaccaacaaacaacagcaaatagctcggattcacctacgatgactaaattcaagtcgccactatcacctgctaataccaccaccgtgagctcatatttttcaagacagagggttctatcaaagagtttttcgcaacggaccaattccagtgatctctcggcagaggaaagcgaccgactacaggctatatcaagagttaactctttaagaaacaggaggcgtagtggccgaaagagctcgagcacttctgagattggataccacatggatgttcttgtttgtgagcctataccgattcatagatatcgggttactaaagacttagaaaatttgggctgtaccgtcgtcagtgttggtgccggtgatgaactagttagtagagccactagtggtgtaagttttgacttaattatgacagccttgaagcttccaaaacttggtgctattgacattgttcaactactaaagcaaacaaatggtgctaattcgacaacaccaattgtggccataacaaattattttcaggaggcggcaaccagtagagtctttgacgatgttttagaaaaaccggtaaaacttgacgagctaaaaaaattggtggctaagtacgcactgaaaaagtctcaagaagatgaagagcatactatattgagcgattctgatgaaacgcactga

SEQ ID NO: 298 - protein, 1770 aa, Saccharomyces cerevisiae
MFNRSNTAGGSQAMKEGLGINKLSPISSNSNPSSLTSSNYEKYLQLATEKNPCMILELELDGKVRYGSPQWNTITGVADDSGSSPTYIADLILGSDQDKGVFQKATDMLLMNDDTSCTITFKIKAADYEGSAGCDDESTITTLEARGILIRDGHTQLPSHTMWIVKPRTNDWSDFYANEDAQDDMVIQLSDNCDDIDIQLPEEFAKTLGFGAKIFVQYLKRIRLEMIIDEFNLPLPKMELCRVCENFVPVWWLETHSQSCVCEHRTESLIQLLHDNLLEQQAILANFTKDSEYKGSQIQVRSNNFLNQVLDSLRELCQDAIDINPSEMVPDLYHSLSTFPQDNGNNNNNNNNNNNNNNALLDQFPIQKDTVSLNSYFQFSPRTNHNIQNVTSWQSRFFLNDDQDPGLALLIHDTLDLARKKVDAVLRLDNAMTYSLKIKNEVNNYVVQLIREQIEINKHAILTHPMNLRSSSIFHSPLPQIHSQQPEAENLIYSSSTPLQVQHDQCASFEAPSKSHLEPIPFPVSSIEETPTANDIRHPSPLPRSCSNTVMKLPTPRRKLDSNGLFSDAYLNADIIPNPSIESTISIDRDNNTNSRGSSMKQYGIGEATDSRTSNSERPSSSSSRLGIRSRSITPRQKIEYSHVDNDDRTNEMLSRDKDSLQPQPSVDTTITSSTQATTTGTKTNSNNSTNSVLPKLMTSISLTPRRGSPSFGNLASHSMQQTNSFKLIHDKSPISSPFTFSKDFLTPEQHPSNIARTDSINNAMLTSPNMPLSPLLLATNQTVKSPTPSIKDYDILKPISKGAYGSVYLARKKLTGDYFAIKVLRKSDMIAKNQVTNVKSERAIMMVQSDKPYVARLFASFQNKDNLFLVMEYLPGGDLATLIKMMGYLPDQWAKQYLTEIVVGVNDMHQNGIIHHDLKPENLLIDNAGHVKLTDFGLSRAGLIRRHKFVPHKSSLSISSTLPIDNPANNFTMNNNNSNHSQLSTPDSFTSDHKQYNRSKKSSLGQQYEHSEYSSTSNSHSMTPTPSTNTVVYPSYYRGKDRSHGSSNIDLPASLRRSESQLSFSLLDISRSSTPPLANPTNSNANNIMRRKSLTENKSFSNDLLSSDAIAATNTNINSNNNISLSPAPSDLALFYPDDSKQNKKFFGTPDYLAPETIEGKGEDNKQCDWWSVGCIFFELLLGYPPFHAETPDAVFKKILSGVIQWPEFKNEEEEREFLTPEAKDLIEKLLVVDPAKRLGAKGIQEIKDHPYFKNVDWDHVYDEEASFVPTIDNPEDTDYFDLRGAELQDFGDDIENDNANILFGKHGINTDVSELSAANLSPPLNHKNILSRKLSMSNTTNRSSNNSNSSVHDFGAHTPVNKLSIASVLESVPQETGYITPNGTGTTTTSAKNSPNLKNLSLAIPPHMRDRRSSKLNDSQTEFGSFNFRNLSALDKANKDAINRLKSEHFSEQPGVHRRTSSASLMGSSSDGSVSTPGSNASNTTSGGKLKIHKPTISGSPSTFGTFPKTFLRSDSFSTRSYSPERSISIDSSTLSRKGSIIGDNQQTTANSSDSPTMTKFKSPLSPANTTTVSSYFSRQRVLSKSFSQRTNSSDLSAEESDRLQAISRVNSLRNRRRSGRKSSSTSEIGYHMDVLVCEPIPIHRYRVTKDLENLGCTVVSVGAGDELVSRATSGVSFDLIMTALKLPKLGAIDIVQLLKQTNGANSTTPIVAITNYFQEAATSRVFDDVLEKPVKLDELKKLVAKYALKKSQEDEEHTILSDSDETH

SEQ ID NO: 299 - DNA, 720 bp, Saccharomyces cerevisiae
atggttagcatgatccatattgtggtgtttttgctagcaatcacaaccatgttcgaaatacttccgctaataaccgtccccgtgaccaagtacctatcgttatcgtcattcagaaaccactattatggcctgtttggctggtgtgtacgtggtcaaaaccaagaattgatgtgcacgaaaatgaagataggatatgacagtacagatgtcgactcctccgggcacgttttgaccctgccatcgaactcaaaagtggtcgtctccaatttattagtggttcacccgatttcactggcattcacaggaacgctattaattttagcagtgattatcatggtaactccactaggggactcacctgagatgttattgttcacggcccttttttcgctgccaacgttcatgctatgtcttttatgttttttggtagatattcttctgttcatctccaaactggactggcccggctggctaatgctagccgctactattagcgtagcactttgttgttccatgctgtgggtcatgagaagagttgtgtcagtcaaaaaatatgaatcgcaacagtcaattgcgcatgcgtgctcaatggaacagtactcaatttccgacatttaccagagtaaacagaacggcaatagctcagaatatgaagtggctccaacacatacagatagtctgattgctccagaagtgacatatagagggttcattgaataa

SEQ ID NO: 300 - protein, 239 aa, Saccharomyces cerevisiae
MVSMIHIVVFLLAITTMFEILPLITVPVTKYLSLSSFRNHYYGLFGWCVRGQNQELMCTKMKIGYDSTDVDSSGHVLTLPSNSKVVVSNLLVVHPISLAFTGTLLILAVIIMVTPLGDSPEMLLFTALFSLPTFMLCLLCFLVDILLFISKLDWPGWLMLAATISVALCCSMLWVMRRVVSVKKYESQQSIAHACSMEQYSISDIYQSKQNGNSSEYEVAPTHTDSLIAPEVTYRGFIE

SEQ ID NO: 301 - DNA, 2031 bp, Saccharomyces cerevisiae
atgggtagacggaagattgaaatccagagaatttctgatgacagaaatagggctgtcacgtttataaaacgtaaagctggcctttttaagaaggcccatgaactatccgttctttgtcaagtagacatagccgtcattatactggggtccaataacacgttctatgagttttcctctgtggatacgaatgatttaatctatcactaccaaaatgacaaaaacttgcttcacgaagtgaaagatccttccgattatggagactttcacaaaagtgcatccgttaacataaatcaagacctactcaggtcgtctatgtcaaataagccttcgaaatcaaatgttaaaggaatgaaccagtcagaaaatgatgatgatgagaacaatgatgaggacgacgatgatcatggcaattttgagaggaattcaaatatgcattcgaataaaaaagcctctgataaaaatataccgagtgcacacatgaagttgttatccccgaccgcactcatttcaaagatggatggtagtgagcaaaataaacgtcatcctgagaacgcgctgccgcctttacaacatttgaaaagattgaaaccggatcctttgcaaataagtagaactccgcaacagcaacagcagcaaaatatatcgagaccataccatagtagcatgtacaatcttaaccagccttcatccagttcatcttctccttccacgatggattttccaaaattaccaagctttcaaaactcttcctttaatggtcgtcctccacccatttccatttcaccgaacaagttcagtaagccatttacaaatgcatcctcaaggacccctaaacaggagcacaaaattaacaatagtggcagcaataataatgacaacagcaactacactcagtcaccatctaattctttggaagactctattcagcagactgtcaaagcaagaaggaaattgtccgccagaccggtacttcgtgtgagaattccgaacaacaatttcagcagtaattccgctattccaagtgaaccctcctctgcctcctccacatcggccaacggcaatagtatgggctcttcgcagataatgaaagaaaacaaaacaagtaggtctagcaaaatttctccactatccgcatctgcctcaggccccttaactctccaaaaaggtaataatggcagaatggtaataaaattgccaaatgcaaatgcgcctaacggttctaacaatggtaatggcagtaacaataacaatcacccttatcctttcggaagtgggtcttcacctcttttttctgcaacacagccatacattgccactcccttgcaaccatcgaatattcctggcggacctttccaacaaaatacatcttttttagctcaaagacaaacccagcaataccaacaaatgtctttcaaaaaacagagccaaacagtaccattaactacaacattaaccggacgccccccttcaactttttccggccctgaaaccagcaatggccctccaactggttcactgccatcgaagttcgtacatgatttgatgagtaattctccaaatgtttcttctatatcgatgtttccagactggtcaatgggacccaacagtgccaagccgggaaacacaaacaatcctggtactttccctcccgtacagacggccgtaaacaacggcaactccagcaatatcagcagcactaacaacactaacaacaacaacaacaataacaacaacaacagcagcaacaacaacagcaacaacggcaacgacaataacagtaacaatagcaataacagttactatagtaataatgaagatgcacccgtaaatggagctgctatttcagaacatactaccgatggtgactcgaacaatcagtccaactcaagtacatatgatgctgctgccaccgcatataatggaaataccgggctgactccatacataaatactgctcaaacaccactaggcactaaattctttaatttttcgactgatatttcaggagaaaaaaattcaagcaaaatataa

SEQ ID NO: 302 - protein, 676 aa, Saccharomyces cerevisiae
MGRRKIEIQRISDDRNRAVTFIKRKAGLFKKAHELSVLCQVDIAVIILGSNNTFYEFSSVDTNDLIYHYQNDKNLLHEVKDPSDYGDFHKSASVNINQDLLRSSMSNKPSKSNVKGMNQSENDDDENNDEDDDDHGNFERNSNMHSNKKASDKNIPSAHMKLLSPTALISKMDGSEQNKRHPENALPPLQHLKRLKPDPLQISRTPQQQQQQNISRPYHSSMYNLNQPSSSSSSPSTMDFPKLPSFQNSSFNGRPPPISISPNKFSKPFTNASSRTPKQEHKINNSGSNNNDNSNYTQSPSNSLEDSIQQTVKARRKLSARPVLRVRIPNNNFSSNSAIPSEPSSASSTSANGNSMGSSQIMKENKTSRSSKISPLSASASGPLTLQKGNNGRMVIKLPNANAPNGSNNGNGSNNNNHPYPFGSGSSPLFSATQPYIATPLQPSNIPGGPFQQNTSFLAQRQTQQYQQMSFKKQSQTVPLTTTLTGRPPSTFSGPETSNGPPTGSLPSKFVHDLMSNSPNVSSISMFPDWSMGPNSAKPGNTNNPGTFPPVQTAVNNGNSSNISSTNNTNNNNNNNNNNSSNNNSNNGNDNNSNNSNNSYYSNNEDAPVNGAAISEHTTDGDSNNQSNSSTYDAAATAYNGNTGLTPYINTAQTPLGTKFFNFSTDISGEKNSSKI

SEQ ID NO: 303 - DNA, 3468 bp, Saccharomyces cerevisiae
atgaatagtaatgaactggatctaagaaataaatatttttatgagatattcggtaagaaaagaaaatcagatacttcaacccctactcagttgttctccggctccaaagttcagacaaacatcaatgaaatttctatcactaacgatgaggatgaagatagtactgaagatgaaaataaggcttcattgaaggattatacactagggcacgacaccggtgcacggtataggatagcaccggactgttcttcccaccaattaaaggcatctcctgtcctacatatttcaacaaaccttaattcaagtccacaatccttcacaggcgatcagatttcacctactaataaaaaaatttcaataaatgattcgaccagacaagataaaggtaacagttgcactaccacttcatcaccttctcaaaaaagatcgaatgttttgcttcctcacgtaagaaaacattcatctccttcactattatcattttccaaaaacagtggcagtcatatgggggatccaaaccagctatctacgcctccaactcccaaaagtgcaggtcacacgatggagttacacagttcattcaatggaaaacatagttcttctagcacctcttctttatttgcattagagtcactgaaaacccaaaatagacgctcatcaaactcttccaatcattctagtcaatatcgacgccatactaatcaacaccaacgtcatcattcaaggtccaaatcaagtcctgtctctctgacggaaatatccatgatcaaaggcacgcctttggtttatcctgcacttttatcactaatagcaattaaattcaaacagaccatcaaattgagcacgcataaaaagatggggttactttacagagattcctttacaggaaaacaagcaattgatactttatgcttgatcataggaagcttagatcgtaatttgggcatgttgatcggaaaatcgctggaagctcaaaaattgttccatgacgtactttatgaccatggcgtaagagattctgtactggagatttacgagttatcttcagaatcaatttttatggcacatcagtcgcagagttctacttcaattgccaacacattttcttcatcatcttcttcagttaattcgctccgtactaaaactgaaatatatggtgtttttgtcccattgacacattgttattcctctacatgctctctggaaaaactttgctactctatttcttgccccaatcgtttgcaacaacaggctaatttacatttaaaattaggtggtggtcttaagagaaatatttcgttagcactcgataaggaggatgatgaacgaatttcctggacaaattctgtaccaaagagcgtatgggaatcattatccaaacaacaaatcaaaaggcaggaggcaatatatgagttgtttactacagaaaagaagtttgtaaaatctttggaaatcatccgagatactttcatgaagaaattattagaaacgaatattattccatctgatgtaaggataaattttgtaaagcacgttttcgcacatatcaatgaaatatattctgtcaatagagaatttttgaaggctttagcacaaaggcaatcattaagcccaatttgtcctggaattgcagatatatttttgcagtatcttcctttctttgatccttttctgtcatacatagcatcaagaccatacgcaaagtatctaattgaaacccaaagatcagttaatcccaattttgctcgttttgacgatgaagtgtctaattcttccctgaggcatgggatcgattcattcctatctcagggtgtttcaagacctggtagatattcactgttggtaagagaaataatacacttctcggacccagtaacagacaaagatgatctacaaatgctaatgaaagtccaagatcttttaaaggatctaatgaaaaggattgatagagcaagcggtgcagcacaagatcgttatgacgttaaagtgttaaagcagaaaattctattcaaaaatgaatacgttaatctgggtttgaataacgaaaaaaggaaaatcaagcatgaaggtttactctcaaggaaggacgtgaacaaaacagatgcgtccttttcaggagacattcaattttacctactcgacaatatgctattattcttgaaatcaaaagctgtaaacaagtggcaccaacacactgtatttcagagaccaattccactccctttactgtttatttgtccggctgaggatatgccacccataaaaagatatgtgacagaaaacccaaattgctcagcgggtgtgctcttaccccaatatcaaacgagcaatcccaagaatgctattgtattcgcctattacggtacgaaacaacaatatcaagttactttgtacgcgccgcagccggccggattacagacattaatagaaaaggtgaaacaagagcaaaaaaggctccttgatgaaactaaacatattacttttaagcaaatggtaggtcaattctttcactcatacataaatactaatcgcgtcaacgatgtcctaatctgtcatgctggtaaaattttattggttgcaacaaatatgggactctttgttcttaattatgctacatcgatcaatcaaaaaccagtgcaccttctgcacaaaatatcaatttcacagatctctgtattggaagaatataaagttatgattcttctaattgacaaaaaactgtacggctgtcctttagacgtaatcgacgatgcagaaaatgcagattttcttttcagaaaaaattctaaagtgttatttaaatatgttgcaatgttcaaagacggtttctgtaatggtaaaagaatcattatgattgcacatcattttttgcacgccgcacaattattgattgttaatcctttgatatttgattttaatagcggtaattttaaaaaaaacctaaaggcaggcttggtagattttagcgttgattctgaacctctgtccttttcttttttggagaataagatctgcattggttgtaaaaaaaatatcaaaatattaaacgtaccggaagtgtgtgataaaaatggatttaaaatgagggagcttttaaatctacatgataacaaagttttagcgaacatgtataaagagacgttcaaagtagtttccatgtttccgataaaaaattcaacttttgcatgttttccagaactctgcttttttctcaataagcaagggaagagggaggagacaaagggatgttttcattgggagggggaaccagaacagttcgcgtgttcctacccttatattgtggcaattaatagtaactttattgaaattagacatatagaaaatggagaacttgtccgctgtgtacttggaaacaagatacgtatgttaaaatcatatgccaagaagatcttatattgttatgaggatcctcaaggatttgaaattatcgaactgttaaatttttga

SEQ ID NO: 304 - protein, 1155 aa, Saccharomyces cerevisiae
MNSNELDLRNKYFYEIFGKKRKSDTSTPTQLFSGSKVQTNINEISITNDEDEDSTEDENKASLKDYTLGHDTGARYRIAPDCSSHQLKASPVLHISTNLNSSPQSFTGDQISPTNKKISINDSTRQDKGNSCTTTSSPSQKRSNVLLPHVRKHSSPSLLSFSKNSGSHMGDPNQLSTPPTPKSAGHTMELHSSFNGKHSSSSTSSLFALESLKTQNRRSSNSSNHSSQYRRHTNQHQRHHSRSKSSPVSLTEISMIKGTPLVYPALLSLIAIKFKQTIKLSTHKKMGLLYRDSFTGKQAIDTLCLIIGSLDRNLGMLIGKSLEAQKLFHDVLYDHGVRDSVLEIYELSSESIFMAHQSQSSTSIANTFSSSSSSVNSLRTKTEIYGVFVPLTHCYSSTCSLEKLCYSISCPNRLQQQANLHLKLGGGLKRNISLALDKEDDERISWTNSVPKSVWESLSKQQIKRQEAIYELFTTEKKFVKSLEIIRDTFMKKLLETNIIPSDVRINFVKHVFAHINEIYSVNREFLKALAQRQSLSPICPGIADIFLQYLPFFDPFLSYIASRPYAKYLIETQRSVNPNFARFDDEVSNSSLRHGIDSFLSQGVSRPGRYSLLVREIIHFSDPVTDKDDLQMLMKVQDLLKDLMKRIDRASGAAQDRYDVKVLKQKILFKNEYVNLGLNNEKRKIKHEGLLSRKDVNKTDASFSGDIQFYLLDNMLLFLKSKAVNKWHQHTVFQRPIPLPLLFICPAEDMPPIKRYVTENPNCSAGVLLPQYQTSNPKNAIVFAYYGTKQQYQVTLYAPQPAGLQTLIEKVKQEQKRLLDETKHITFKQMVGQFFHSYINTNRVNDVLICHAGKILLVATNMGLFVLNYATSINQKPVHLLHKISISQISVLEEYKVMILLIDKKLYGCPLDVIDDAENADFLFRKNSKVLFKYVAMFKDGFCNGKRIIMIAHHFLHAAQLLIVNPLIFDFNSGNFKKNLKAGLVDFSVDSEPLSFSFLENKICIGCKKNIKILNVPEVCDKNGFKMRELLNLHDNKVLANMYKETFKVVSMFPIKNSTFACFPELCFFLNKQGKREETKGCFHWEGEPEQFACSYPYIVAINSNFIEIRHIENGELVRCVLGNKIRMLKSYAKKILYCYEDPQGFEIIELLNF

SEQ ID NO: 305 - DNA, 4071 bp, Saccharomyces cerevisiae
atgagcgaaaccaacgttgacagcttaggggacagaaatgacatatactcccaaatatttggtgtagaaaggaggccagattccttcgctacttttgatagtgactcgcacggagacataagttctcagctgctgcctaatagaatcgaaaatatccagaatctaaatgttctgctttctgaagacattgctaatgacatcattattgccaagcagaggagacgttctggagttgaagccgccatcgatgattctgatataccaaataacgaaatgaaggggaaaagctcaaattacattttatcgcagcagactaatattaaggaagttccagatacacaaagtttgtctagtgctgataatacacctgtgagcagtccaaagaaggcaagagatgccacatcttcccatcccattgttcatgctaaatcgatgtcccatatatattcaacgagtaatagtgctagtagacaagccaagcactataatgaccaccctttgcctccaatgtctccaagaaatgaagtttaccagaagaataaaagtactacagcttttgtgcctaagaggaaaccttcgctcccgcaactagcacttgctggtcttaagaagcagagcagtttttccaccggcagtgcatcaaccactcctacacaggctagaaaatcgcctttgcaagggtttggtttcttttcgagaccaagttccaaagacttgcacgaacagcaccaacatcaccagcatattcagcataataatattaacaatcataataataataatactaataataatggcgcacattatcaagtgggtagtagtaacagtaattaccctcaacattcacattctatatcatctagatcgatgtcgttgaactcatctactctaaaaaatattgcatcatcttttcaatcgaagacttctaacagcaggaaagctacgcaaaaatatgatataacttccaacccattctcagatcctcatcatcatcatcatcatcatcactcttcaaacagtcacagtagcctaaataatgtccacgggtctggaaactcctcaagtgttatgggaagctcgtctaatattgggttgggtcttaaaacgagagtttcttccacctcattagctttaaaaagatacacttcggtttcaggaacttctctatcttctccacgtagaagtagtatgacacctttgtcggcatctagacctgttatgagcgcttcatcaaaaaaacctcaggtatatccagctttgttgtcaagagtcgccacaaaatttaaaagttcgatacaactcggggaacataagaaggatggattagtttaccgtgacgcatttacagggcagcaggcagtcgatgtcatctgtgctatcattagaacttctgatagaaacttagccttgttatttggtagatcactagatgcacaaaagctgttccatgatgtggtatacgagcacaggttaagagattcaccacatgaagtttacgaatttacagataactcaagatttacaggaacaggttccacaaacgcccatgatccactgatgctactcccaaactcatcatcttttaattccgggaaccactcttatccgaattccggaatggttccatcaagttcaacttcatctttgaatagtgatcaggcaactttgacagggtcgaggctacatatgagtagttcattgtcccagcaaaagaaccctgcagccattcataacgtcaatggtgtgtttacattactggcggaatgctattcccctacgtgcacaagagacgctttgtgttactctatttcgtgtccaagacgtcttgagcaacaagcaaggttaaatctgaaaccaaatggcggcctgaaacgtaatatatcaatggcattggatgatgatgacgaagaaaagccatcttggacaagttccgtatctaaagaggattgggaaaacttaccaaaaaaggaaataaaaagacaagaggctatttatgaagtttatatcacggagaagaactttgtaaaatcattagaaattacaagagacacattcatgaagactttggctgaaacaaatattatttcagcagatattagaaaaaatttcatcaagcatgtttttgcacatataaacgatatctattcagtgaatagacgttttttgaaggctttaactgataggcaaagaagttcaccagttgtgagaggaattggggacattgttttaagattcattccattttttgaaccatttgtttcatatgtcgcttcaagaccatatgcgaagtacttgattgaaacccaaagatcagtcaatccctattttgctagatttgatgacgatatgatgagctcctccttacgtcatggtattgattcgtttttatctcaaggtgtttcaagaccaggtcgatatatgctattggtcaaagaaatcatgaaatctactgaccccgagaaggacaaaagtgattatgaagatttaagcaaagccatggatgcattaagggattttatgaaaaggattgatcaagcaagtggtgctgcacaagatagacatgatgtaaaattgttgaaacaaaagattcttttcaaaaacgaatacgttaatttaggattaaatgacgaaaggagaaaaattaaacatgaaggtatactatcacggaaggagttgtcaaaatcggacggaacagttgttggtgacatacaattttatcttctagataatatgctcttatttttaaaggccaaagcagttaataaatggcaccagcataaggtattccaaaggcccattccattgccattgttatttgcatgtccaggtgaagatatgcctgcgttgaggaaatatattggagaccacccagattgttcaggaactgtaattcaaccagaatacaacacgagtaatcctaaaaacgcaataactttcttatactacggtgccaagcagagatatcaagttacattatatgctgcgcaatacgctggattgcaaacgcttttggaaaaaataaagcaaggacaagcagctattataagcaaaacggagatgttcaatgtaacgaaaatgagcgataggttcttcgattacaccaacaaaattaacagtgttacttcctgtgatgggggtagaaaacttctgattgcaacgaactctggattgtatatgagcaacattaaaagacagcagaataaagatcatagacataaaagctctgcttttttttcaactccaatccaactagtacaaagaaataatatcactcaaattgctgtattagaagaattcaaatcaatcatacttttaattgataaaaaattatacagttgtccgctgtcattaatcgaagcagaaggtaatgggacatctttcttcaaaaagcatcacaaggaactgatcaatcatgtgagtttcttcgcagaaggagattgcaatggtaagagattaatcgtgactgcacacagttcatcgcattcaattaagtacttcgagcatgaacatccattattggccgaaaaaaatggtagtggtagcggtaacaaaaaaagtctcaagaaaaaaatcaccgaggttatttttgattctgaacctgtctctatttcatttctcaaggccaacctatgcattggctgtaaaaagggttttcagatcgttagcatttcacagaatgctcatgaatccttgttagatccggccgatacatcattagagtttgcactaagggatactttgaaaccaatggcaatctatcgtgtgggaaatatgtttttgctgtgttacacagaatttgccttctttgtcaataatcagggttggagaaagaaagaatcgcatattattcattgggagggagagccccaaaaatttgcaatttggtacccgtacatcttggcattcgacagcaacttcattgagatcagaaagattgaaactggcgaattaattcgttgcgtccttgctgataagattcgacttctacaaacaagtactcaagaaatcctgtactgctacgaggattatcgcgggtatgatacagttgcgtcgttagatttctggggttaa

SEQ ID NO: 306 - protein, 1356 aa, Saccharomyces cerevisiae
MSETNVDSLGDRNDIYSQIFGVERRPDSFATFDSDSHGDISSQLLPNRIENIQNLNVLLSEDIANDIIIAKQRRRSGVEAAIDDSDIPNNEMKGKSSNYILSQQTNIKEVPDTQSLSSADNTPVSSPKKARDATSSHPIVHAKSMSHIYSTSNSASRQAKHYNDHPLPPMSPRNEVYQKNKSTTAFVPKRKPSLPQLALAGLKKQSSFSTGSASTTPTQARKSPLQGFGFFSRPSSKDLHEQHQHHQHIQHNNINNHNNNNTNNNGAHYQVGSSNSNYPQHSHSISSRSMSLNSSTLKNIASSFQSKTSNSRKATQKYDITSNPFSDPHHHHHHHHSSNSHSSLNNVHGSGNSSSVMGSSSNIGLGLKTRVSSTSLALKRYTSVSGTSLSSPRRSSMTPLSASRPVMSASSKKPQVYPALLSRVATKFKSSIQLGEHKKDGLVYRDAFTGQQAVDVICAIIRTSDRNLALLFGRSLDAQKLFHDVVYEHRLRDSPHEVYEFTDNSRFTGTGSTNAHDPLMLLPNSSSFNSGNHSYPNSGMVPSSSTSSLNSDQATLTGSRLHMSSSLSQQKNPAAIHNVNGVFTLLAECYSPTCTRDALCYSISCPRRLEQQARLNLKPNGGLKRNISMALDDDDEEKPSWTSSVSKEDWENLPKKEIKRQEAIYEVYITEKNFVKSLEITRDTFMKTLAETNIISADIRKNFIKHVFAHINDIYSVNRRFLKALTDRQRSSPVVRGIGDIVLRFIPFFEPFVSYVASRPYAKYLIETQRSVNPYFARFDDDMMSSSLRHGIDSFLSQGVSRPGRYMLLVKEIMKSTDPEKDKSDYEDLSKAMDALRDFMKRIDQASGAAQDRHDVKLLKQKILFKNEYVNLGLNDERRKIKHEGILSRKELSKSDGTVVGDIQFYLLDNMLLFLKAKAVNKWHQHKVFQRPIPLPLLFACPGEDMPALRKYIGDHPDCSGTVIQPEYNTSNPKNAITFLYYGAKQRYQVTLYAAQYAGLQTLLEKIKQGQAAIISKTEMFNVTKMSDRFFDYTNKINSVTSCDGGRKLLIATNSGLYMSNIKRQQNKDHRHKSSAFFSTPIQLVQRNNITQIAVLEEFKSIILLIDKKLYSCPLSLIEAEGNGTSFFKKHHKELINHVSFFAEGDCNGKRLIVTAHSSSHSIKYFEHEHPLLAEKNGSGSGNKKSLKKKITEVIFDSEPVSISFLKANLCIGCKKGFQIVSISQNAHESLLDPADTSLEFALRDTLKPMAIYRVGNMFLLCYTEFAFFVNNQGWRKKESHIIHWEGEPQKFAIWYPYILAFDSNFIEIRKIETGELIRCVLADKIRLLQTSTQEILYCYEDYRGYDTVASLDFWG

SEQ ID NO: 307 - DNA, 1107 bp, Saccharomyces cerevisiae
atgaatcctaaatcctctacacctaagattccaagacccaagaacgcatttattctgttcagacagcactaccacaggatcttaatagacgaatggaccgctcaaggtgtggaaataccccataattcaaacatttctaaaattattggtacgaagtggaagggcttacaaccggaagataaggcacactgggaaaatctagcggagaaggagaaactagaacatgaaaggaagtatcctgaatacaaatacaagccggtaagaaagtctaagaagaagcaactacttttgaaggaaatcgagcaacagcagcagcaacaacagaaagaacagcagcagcagaaacagtcacaaccgcaattacaacagccctttaacaacaatatagttcttatgaaaagagcacattctctttcaccatcttcctcggtgtcaagctcgaacagctatcagttccaattgaacaatgatcttaagaggttgcctattccttctgttaatacttctaactatatggtctccagatctttaagtggactacctttgacgcatgataagacggcaagagacctaccacagctgtcatctcaactaaattctattccatattactcagctccacacgacccttcaacgagacatcattacctcaacgtcgctcaagctcaaccaagggctaactcgacccctcaattgccctttatttcatccattatcaacaacagcagtcaaacaccggtaactacaactaccacatccacaacaactgcgacatcttctcctgggaaattctcctcttctccgaactcctctgtactggagaacaacagattaaacagtatcaacaattcaaatcaatatttacctccccctctattaccttctctgcaagattttcaactggatcagtaccagcagctaaagcagatgggaccaacttatattgtcaaaccactgtctcacaccaggaacaatctattgtccacaactacccctacgcatcatcacattcctcatataccaaaccaaaacattcctctacatcaaattataaactcaagcaacactgaggtcaccgctaaaactagcctagtttctccgaaatga

SEQ ID NO: 308 - protein, 368 aa, Saccharomyces cerevisiae [sequence omitted]

SEQ ID NO: 309 - DNA, 831 bp, Saccharomyces cerevisiae
atgggtactagcatagtaaatctaaaccaaaagattgaactgcccccaatccaggtcttattcgagtcacttaaccgagaaaatgaaacaaaaccccacttcgaggaacgcaggttatatcaacctaatccttcatttgttcctagaacaaatatagcagttggtagcccagttaacccggttccagtatcatcccctgtttttttcattggtccttctccacagagaagcattcagaatcacaacgctattatgactcaaaacatacgtcagtatccagttatatataataataaccgagaagttatatctacgggtgagagaaattacataataactgtaggggggcctccggtaacttcttcgcagcccgagtatgagcatatctcaactcccaatttctatcaagagcagagactggcacaacctcatccggtaaatgagagtatgatgataggtggttatacaaatcctcagcctattagcatttcccgaggtaaaatgctatccggcaacataagtacgaactcggtccgcggatctaataatggatattccgcaaaagaaaaaaaacataaggcacatggtaagaggtccaatttaccaaaggccaccgtttcaattctaaacaaatggttacatgagcacgtaaacaacccttacccaaccgtgcaggaaaaaagagaactgctcgcgaaaactggtctaactaaacttcaaatttccaattggttcattaatgctaggagaagaaaaatattttctggccagaatgacgcaaataatttcagaagaaaattcagttcttctacaaatttagctaagttctga

SEQ ID NO: 310 - protein, 276 aa, Saccharomyces cerevisiae
MGTSIVNLNQKIELPPIQVLFESLNRENETKPHFEERRLYQPNPSFVPRTNIAVGSPVNPVPVSSPVFFIGPSPQRSIQNHNAIMTQNIRQYPVIYNNNREVISTGERNYIITVGGPPVTSSQPEYEHISTPNFYQEQRLAQPHPVNESMMIGGYTNPQPISISRGKMLSGNISTNSVRGSNNGYSAKEKKHKAHGKRSNLPKATVSILNKWLHEHVNNPYPTVQEKRELLAKTGLTKLQISNWFINARRRKIFSGQNDANNFRRKFSSSTNLAKF

SEQ ID NO: 311 - DNA, 2475 bp, Saccharomyces cerevisiae
atgatgaatttttttacatcaaaatcgtcgaatcaggatactggatttagctctcaacaccaacatccaaatggacagaacaatggaaacaataatagcagcaccgctggcaacgacaacggatacccatgtaaactggtgtccagtgggccctgcgcttcatcaaataatggtgccctttttacgaattttactttacaaactgcaacgccgaccaccgctattagtcaggacttatatgcaatgggcacaacaggaataacatcagaaaatgccctttttcaaatgaagtcaatgaataatggaatatcatcagttaataataacaacagcaacacccctacgattattaccacgtcacaggaagaaactaatgctggaaatgtacatggcgataccggtggcaattctttgcaaaattctgaagatgacaacttttcttccagttctaccaccaaatgcttactctcttccacttcttcgctatcaataaatcaacgagaagcagcagcagctgcttatggtccagataccgatattcctaggggtaaactagaagttacaataatagaagcacgtgacctagtcactagatcaaaggattcacagccttatgttgtttgtacttttgagagttcagagttcatttctaatggtcctgagtcactaggcgccattaataataacaacaataacaacaacaataatcagcataatcaaaaccagcatattaacaacaacaacgaaaataccaaccctgacgctgctagccagcatcataataataacagtggttggaacggttctcagttaccatcgataaaagagcacttgaagaaaaaacccctttatacacacagatcatcttcccaattagatcagctaaactcttgctcttcagtaaccgatccgagcaaacgttcttctaattcttcgtcgggttcttcaaatggtccaaagaatgatagttcacatccaatatggcatcacaagacaacgtttgatgttttgggatctcactcggaattagatatttctgtttatgatgctgcccacgaccatatgttcttaggccaagttagactgtatccaatgattcataatttagcacatgcttcccaacaccaatggcacagtttgaaacctcgcgttattgatgaagttgtgtccggtgatattttaatcaaatggacttacaaacagacaaagaaaagacattatggcccacaagattttgaagttcttcgattattgggtaagggtacttttggccaagtctaccaagttaagaagaaagacactcaaagaatttatgcaatgaaagttctctccaagaaagttattgtcaagaaaaatgagatcgcccacacaattggcgaaagaaatatcctagtcacgacagcgtccaaatcgtccccattcattgtcggattgaagttttcctttcaaacaccaacagatctgtatttggtcactgattatatgagtggtggagaattattctggcatttacaaaaggagggccgtttttcggaagacagagcgaaattctatatcgctgagttagtcctagcgttagaacatttacacgataacgatatcgtttacagggacctaaagcctgaaaacattctactcgatgccaacggtaacatcgctctttgcgattttggtctttctaaagctgacttgaaggatagaacaaacacattttgcggcaccacggaatacctggcaccagaattgttactggacgaaaccggctacaccaaaatggtcgatttctggtctctaggtgttttgatatttgaaatgtgttgtggttggtcccctttctttgcggaaaataatcaaaaaatgtaccaaaaaattgcctttggtaaagtcaaattccccagagacgtactgtcacaagaggggaggtcttttgtaaagggtttactaaacagaaaccccaaacatagactcggtgccattgatgatggaagagaactacgagctcatccatttttcgcagatatcgactgggaggccttgaagcagaaaaaaattccaccacctttcaaacctcacctagtctcggagacggatacctcgaattttgacccagagttcacaacagcttcaacttcatacatgaacaagcaccagccgatgatgactgctaccccgctatctccagccatgcaagcaaagtttgctggtttcacctttgttgatgagtccgccatcgatgaacacgttaataacaacagaaaattcctacaaaactcgtactttatggaacctggttcctttatcccgggaaatccaaacttacctccagacgaagatgtcatcgatgatgacggggacgaggacatcaatgatggattcaaccaagagaaaaatatgaacaacagccattcgcagatggacttcgacggcgaccaacacatggatgacgaatttgtcagtggaagattcgaaatatga

SEQ ID NO: 312 - protein, 824 aa, Saccharomyces cerevisiae
MMNFFTSKSSNQDTGFSSQHQHPNGQNNGNNNSSTAGNDNGYPCKLVSSGPCASSNNGALFTNFTLQTATPTTAISQDLYAMGTTGITSENALFQMKSMNNGISSVNNNNSNTPTIITTSQEETNAGNVHGDTGGNSLQNSEDDNFSSSSTTKCLLSSTSSLSINQREAAAAAYGPDTDIPRGKLEVTIIEARDLVTRSKDSQPYVVCTFESSEFISNGPESLGAINNNNNNNNNNQHNQNQHINNNNENTNPDAASQHHNNNSGWNGSQLPSIKEHLKKKPLYTHRSSSQLDQLNSCSSVTDPSKRSSNSSSGSSNGPKNDSSHPIWHHKTTFDVLGSHSELDISVYDAAHDHMFLGQVRLYPMIHNLAHASQHQWHSLKPRVIDEVVSGDILIKWTYKQTKKRHYGPQDFEVLRLLGKGTFGQVYQVKKKDTQRIYAMKVLSKKVIVKKNEIAHTIGERNILVTTASKSSPFIVGLKFSFQTPTDLYLVTDYMSGGELFWHLQKEGRFSEDRAKFYIAELVLALEHLHDNDIVYRDLKPENILLDANGNIALCDFGLSKADLKDRTNTFCGTTEYLAPELLLDETGYTKMVDFWSLGVLIFEMCCGWSPFFAENNQKMYQKIAFGKVKFPRDVLSQEGRSFVKGLLNRNPKHRLGAIDDGRELRAHPFFADIDWEALKQKKIPPPFKPHLVSETDTSNFDPEFTTASTSYMNKHQPMMTATPLSPAMQAKFAGFTFVDESAIDEHVNNNRKFLQNSYFMEPGSFIPGNPNLPPDEDVIDDDGDEDINDGFNQEKNMNNSHSQMDFDGDQHMDDEFVSGRFEI

SEQ ID NO: 313 - DNA, 2037 bp, Aspergillus nidulans
atgtctaccgaggataatcacgattcgcaaattttgacggcaagacatcgctcggacgccagcgagcagtcgttcaaatccctgttcggcggcccatcgagtgaagacggaaaagagacggagcccgatacccacgatcataaccatagcttcagcaacgcaaaggcgcccgcaaagtttgcaaaccagaatgtcgcacccttcctcgccagacacatccctgaacaatatgcacccttaggtgctcagtcgattctaccagcagatctcagcagcgcaaactccaaatactgttatcgccatcgcccagatcagaaatgtagacggcaagccgacgagccatctatggataagctacagcgggaactggaatcgcttcctcaaggtgatcagcagagcatatcacatgtctggtccttgttctctgctgcgcctgccaaacatcggaaactcattctgcagggaatcatggctcaatgctgtttcccgcaactctcttacatctccgccaccgtccgtgacctcatccgaatcgatttcatcaccgcgctccctcccgagattgctttcaaaatcctttgctatctggatacaacctctctgtgcaaggcttcccaggtctcgcgcggatggcgtgcgctagccgatgatgatgtagtttggcacagaatgtgtgaacaacatattcatcgcaagtgcaaaaagtgtggttggggcttaccgcttctggatcgcaaacgattgcgtgagtcgaagcgtgagattgaacttcgtgctacaacgtgggacaagggagtggtgggcccacgatcccctgatgcttcggcagagtcacctccttcgggcaaacgaaagcttgaggatgacgaggttgctgttgttaagcggcactgttcatcgctcgggtcagacgcaggagtcgacaaagatagtgatttcttcaagacccgctaccggccatggaaggaagtgtacaaagatcgcttcaaggtcggcacgaactggaaatacgggcgatgctcgatcaaaacatttaagggacatactaatggagtcatgtgtctgcaattcgaggataacattcttgccactggctcctacgacactacaatcaaaatctgggacactgaaaccggggaggagctgcgcacactccgtggacacgagtctggcatccgttgcttacagtttgacgacaccaagttgatcagcggcagcatggaccgcactatcaaggtctggaactggcgcactggggagtgcatttccacatatactggtcaccgcgggggagtcattgggcttcactttgatgcttcgattctcgcctctggctcggttgacaagacggtcaagatctggaacttcgaggataagtcgactttctccctgcgtggacacacagattgggtcaatgcagtcagagtcgacacttcctctcgaactgtcttctcagcatctgatgactgtactgttcgcctttgggacttggacacgaaaacctgcattcggactttccatggacacgtgggtcaagtgcagcaggttgttcctctgccccgcgaatttgagttcgaagaacatgatgccgagtgcgagaacgacgatctcagtaccacctccggcgacgcgaacccgccgtcaatccaggcttcgatgggtttggaacccaacgcagcgtacagccaatcctcggcctttgggacttcgttcgataacggccgtgccgcgccgccacgatacatggttacaagtgcgctggattctacgatccgcctctgggaaaccaccaccggccgctgcttgcgtacgttcttcggccacttggagggagtatgggcgctgggagccgacactctccgcatcgtctctggcgctgaagaccgtatgatcaagatctgggaccccagaactggtaaatgcgagcgtactttcaccggccactctggccctgtcacttgcattggccttggtgacagtcgattcgctactggcagcgaggactgcgaagtacggatgtacagctttcagagttaa

SEQ ID NO: 314 - protein, 678 aa, Aspergillus nidulans
MSTEDNHDSQILTARHRSDASEQSFKSLFGGPSSEDGKETEPDTHDHNHSFSNAKAPAKFANQNVAPFLARHIPEQYAPLGAQSILPADLSSANSKYCYRHRPDQKCRRQADEPSMDKLQRELESLPQGDQQSISHVWSLFSAAPAKHRKLILQGIMAQCCFPQLSYISATVRDLIRIDFITALPPEIAFKILCYLDTTSLCKASQVSRGWRALADDDVVWHRMCEQHIHRKCKKCGWGLPLLDRKRLRESKREIELRATTWDKGVVGPRSPDASAESPPSGKRKLEDDEVAVVKRHCSSLGSDAGVDKDSDFFKTRYRPWKEVYKDRFKVGTNWKYGRCSIKTFKGHTNGVMCLQFEDNILATGSYDTTIKIWDTETGEELRTLRGHESGIRCLQFDDTKLISGSMDRTIKVWNWRTGECISTYTGHRGGVIGLHFDASILASGSVDKTVKIWNFEDKSTFSLRGHTDWVNAVRVDTSSRTVFSASDDCTVRLWDLDTKTCIRTFHGHVGQVQQVVPLPREFEFEEHDAECENDDLSTTSGDANPPSIQASMGLEPNAAYSQSSAFGTSFDNGRAAPPRYMVTSALDSTIRLWETTTGRCLRTFFGHLEGVWALGADTLRIVSGAEDRMIKIWDPRTGKCERTFTGHSGPVTCIGLGDSRFATGSEDCEVRMYSFQS

SEQ ID NO: 315 - DNA, 2301 bp, Saccharomyces cerevisiae
atgagtgaagaggaaacggtctcagccccagctccagcttctacaccggccccggctggaaccgatgtaggtagtggtggagcagcagctggaatagctaatgctggtgctgaaggcggcgacggtgccgaggatgttaagaaacatgggtcgaagatgctagtggggcccaggccgccacaaaatgcgatattcatccataagctataccagattctggaggacgaatcgctacacgacttgatatggtggaccccttcgggcttatccttcatgattaagcctgtggaacggtttagtaaggctttggctacatatttcaagcatactaatatcacgagctttgtaagacagttgaacatttacggctttcacaaggtgtcgcatgatcatagcagcaacgacgctaatagtggcgacgacgccaatactaatgatgacagcaatactcacgatgataatagtggcaacaaaaacagtagtggcgacgaaaataccggtggcggtgtccaagaaaaggagaaaagtaaccccactaaaatctgggaatttaagcatagttctggtattttcaagaaaggtgacattgagggactcaaacacattaagagaagagcttcttcccgtaataactcctcaattaacagtcgaaagaattctagtaatcaaaactacgatatagattccggtgcaagagtaagaccctcttcgattcaagacccgtccaccagttccaattcctttggtaatttcgttccgcaaattccgggcgccaataactctatccccgagtactttaataactctcatgtaacttacgaaaacgcaaaccatgccccgctggaatccaataacccggaaatgcaagagcaaaacagacctccgaactttcaagatgaaacactgaaacatttgaaagaaataaattttgatatggttaagattatagagtctatgcagcatttcatatctttgcaacacagtttttgttcacagagtttcaccttcaagaatgtgagcaagaaaaaatcggaaaatatcgtgaaggatcaccaaaagcaacttcaggcattcgaaagcgatatgttaactttcaaacagcacgtcatgtcgagggcccaccgtacaatagattctctttgtgctgtaaatgctgccgctaccgctgcctctgtcgcccctgcacccgcgcccacatccacatctgcatatgcacccaaatctcagtatgagatgatggttcctccagggaaccagtatgtcccgcagaaatcttcctcgaccacgaacatcccttcgagattcaacacggcttcagtgccgccctcgcaacttttgtacaataccaaccgcagtcgcaaccaacatgtgacttatgcgagcgaaccggcacatgtaccaaactttatcaatcagccgatacccatccaacaactacctccacaatatgcagacacttttagcactccacaaatgatgcacaatccttttgcctcgaaaaataacaacaaaccgggcaacacgaagaggaccaatagtgttctcatggacccgctgactcccgcagcgagtgttggagttcagggtccactaaactatcctatcatgaatattaatccttctgtccgtgactacaacaagcctgtccctcaaaatatggctccgagtccaatatatcctattaatgaaccaacaacgagattgtattctcaaccaaaaatgagaagtctcgggtctacaagctctttgcccaacgatagaagaaacagtcctctgaagctgacaccgagatcatcgttgaatgaagatagtctgtatcccaaacctagaaactctctcaaatccagtatttcgggcacgtctttatcctcctcttttacactagttgccaacaatccagccccaattcggtactctcagcagggattgcttcgctcattaaacaaagctgctaattgtgctccagattcggtaactccattagactcgtctgtcttgacgggccctcctccaaaaaacatggacaatcttcctgctgtttcttcaaatttaataaactcccccatgaacgtcgagcacagctcaagcctatcacaagcagaacctgcaccacaaatagaactaccgcagccatctttgcccacaacgagcaccactaagaatactggcgaggctgacaatagtaagagaaaagggagcggtgtttattctttactgaatcaagaggatagcagcacgtccagtgctgatcctaaaactgaagataaggccgctccggcactcaaaaaggttaagatgtga

SEQ ID NO: 316 - protein, 766 aa, Saccharomyces cerevisiae
MSEEETVSAPAPASTPAPAGTDVGSGGAAAGIANAGAEGGDGAEDVKKHGSKMLVGPRPPQNAIFIHKLYQILEDESLHDLIWWTPSGLSFMIKPVERFSKALATYFKHTNITSFVRQLNIYGFHKVSHDHSSNDANSGDDANTNDDSNTHDDNSGNKNSSGDENTGGGVQEKEKSNPTKIWEFKHSSGIFKKGDIEGLKHIKRRASSRNNSSINSRKNSSNQNYDIDSGARVRPSSIQDPSTSSNSFGNFVPQIPGANNSIPEYFNNSHVTYENANHAPLESNNPEMQEQNRPPNFQDETLKHLKEINFDMVKIIESMQHFISLQHSFCSQSFTFKNVSKKKSENIVKDHQKQLQAFESDMLTFKQHVMSRAHRTIDSLCAVNAAATAASVAPAPAPTSTSAYAPKSQYEMMVPPGNQYVPQKSSSTTNIPSRFNTASVPPSQLLYNTNRSRNQHVTYASEPAHVPNFINQPIPIQQLPPQYADTFSTPQMMHNPFASKNNNKPGNTKRTNSVLMDPLTPAASVGVQGPLNYPIMNINPSVRDYNKPVPQNMAPSPIYPINEPTTRLYSQPKMRSLGSTSSLPNDRRNSPLKLTPRSSLNEDSLYPKPRNSLKSSISGTSLSSSFTLVANNPAPIRYSQQGLLRSLNKAANCAPDSVTPLDSSVLTGPPPKNMDNLPAVSSNLINSPMNVEHSSSLSQAEPAPQIELPQPSLPTTSTTKNTGEADNSKRKGSGVYSLLNQEDSSTSSADPKTEDKAAPALKKVKM

SEQ ID NO: 317 - DNA, 1104 bp, Saccharomyces cerevisiae
atgtcaatatcatcaaagataagaccaactcctcgtaaaccttcacgtatggctaccgaccattcttttaaaatgaaaaaattttatgccgatcctttcgctatatcatcaatttctttggcaattgtatcgtgggtcatcgccatcgggggctccatctcatctgcatccaccaatgaatccttcccacgttttacttggtggggtatagtataccaatttctaattatttgttctttaatgctgttctattgttttgatttagtcgatcattacagaatcttcatcaccacatctattgcagtggcatttgtgtataatacaaacagtgcaacgaatttagtgtatgcggatggtcccaagaaagctgctgcttcagcaggtgtcatcttactttccatcataaatttaatctggattctgtactacggcggtgataatgcttccccaaccaatagatggattgattcgttttccattaagggtatcaggccttcgccattagagaattctcttcatagagctcgtcgaagaggcaataggaacacaacgccttaccaaaataatgtctataatgatgctatacgagactcaggctacgcgacacagtttgatggatatccacagcagcaaccttctcacacaaattatgtatcttctacggcattggctggttttgagaatactcagccaaatacttcagaagccgttaatcttcacttgaacactctacaacaacgtatcaatagcgcaagcaacgcgaaggaaaccaatgataatagcaataatcaaaccaatactaatataggtaatacgttcgatactgatttttcaaatggcaatacggaaactacgatgggagacactttgggtctgtatagcgatatcggtgatgataatttcatttacaaggcaaaagcactgtacccatacgacgctgatgacgatgatgcttacgaaatctcatttgaacaaaatgaaatcctacaagtctctgacattgaaggcagatggtggaaggcaagaagggcaaacggtgaaacaggtattattccaagcaattatgttcaactaatcgatggtccagaagaaatgcatcgttaa

SEQ ID NO: 318 - protein, 367 aa, Saccharomyces cerevisiae
MSISSKIRPTPRKPSRMATDHSFKMKKFYADPFAISSISLAIVSWVIAIGGSISSASTNESFPRFTWWGIVYQFLIICSLMLFYCFDLVDHYRIFITTSIAVAFVYNTNSATNLVYADGPKKAAASAGVILLSIINLIWILYYGGDNASPTNRWIDSFSIKGIRPSPLENSLHRARRRGNRNTTPYQNNVYNDAIRDSGYATQFDGYPQQQPSHTNYVSSTALAGFENTQPNTSEAVNLHLNTLQQRINSASNAKETNDNSNNQTNTNIGNTFDTDFSNGNTETTMGDTLGLYSDIGDDNFIYKAKALYPYDADDDDAYEISFEQNEILQVSDIEGRWWKARRANGETGIIPSNYVQLIDGPEEMHR

SEQ ID NO: 319 - DNA, 633 bp, Saccharomyces cerevisiae
atgttctcatattcagatttctgttctatcggtacggccatgatcttatcggccacaacgttcctaatgggtgttttcttcagtaacatgccatacgattatcatcttttatttaatcctaactctactcaagagcatttcgatttggcactgagacattaccaaattttacatgagactccattgccggtgattgttactttgtgcgttgttgccggtattggcttagttggtggtacaattaaggttttcaagccaaaccctgaactgcagatgtttgagtattgttcattggggttgtacgtgttggctatctgtgtgtttctcactaatgtgaaaacaggtatcgactgttctgtgagccataattggggagaagttacggaaaatcagggtttggcagttattgcttcctccaacataattttattagttatgtttgccggtgttatcatcctacaaattggtttgtggtacagtaactgggatttgcaaaaaagattaaaggagttttatgctcaagaagaaagagaagctgccaatgccggtaaaaagactgagaaagttgacaatgcgaaaaagaatgataacaaatctaaaggtgctcaaaagaggaagaacgccaaaaaatag

SEQ ID NO: 320 - protein, 210 aa, Saccharomyces cerevisiae
MFSYSDFCSIGTAMILSATTFLMGVFFSNMPYDYHLLFNPNSTQEHFDLALRHYQILHETPLPVIVTLCVVAGIGLVGGTIKVFKPNPELQMFEYCSLGLYVLAICVFLTNVKTGIDCSVSHNWGEVTENQGLAVIASSNIILLVMFAGVIILQIGLWYSNWDLQKRLKEFYAQEEREAANAGKKTEKVDNAKKNDNKSKGAQKRKNAKK

SEQ ID NO: 321 - DNA, 4611 bp, Saccharomyces cerevisiae
atgtcacaggtttggcataattcgaattcgcaatcaaacgatgtggctacttcaaatgacgctacgggttccaacgaaagaaacgaaaaagaaccgtccctccagggaaataagcccggttttgttcaacagcagcaacggattactttaccctcgctatctgccttgagtactaaggaggaagatagaagagattccaatggccaacaggctctaacttctcatgctgctcacatattaggttatcctcccccacattcaaatgctatgccctcaattgcaactgattcagcattgaaacagccccacgagtatcaccctcgccctaaatcttcgtcctcttctccctctataaacgcttcgcttatgaatgctggtccagctcccctccccacagtgggagccgccagtttttctttgtcgagatttgacaatccattaccgataaaagctcctgttcatacagaggaaccaaaaagttataatggtcttcaggaagaagaaaaggcgacgcaacggcctcaagattgcaaggaagttcccgctggtgtgcagcctgctgatgcccctgaccctagcagcaaccatgcagatgctaacgatgacaataataacaacgaaaattctcacgatgaagatgctgactacagacctctaaacgtgaaggatgccctatcttacctcgaacaggtcaaatttcaatttagttcgcgtccggatatctataatttatttttagatattatgaaggactttaaatctcaggcaatagacacaccgggcgttattgaaagagtatccactttgttcagaggttatccaattttgattcaagggttcaatacttttctaccccaaggctatagaatcgaatgctcctctaatccggacgaccccattagagttactacaccaatgggtactacgacagtaaacaataacatcagtccatctggtagaggtacaacggatgcacaggaacttggttcttttccagaaagcgatggaaatggtgttcaacagccctccaatgtgccaatggtgccttcgagtgtgtatcaatcggaacaaaaccaagaccaacaacaatctttgcctcttttagctacttcttctggtttaccttcaattcaacaacctgaaatgcctgcacatcgccaaatcccacaaagtcaatctttagtgcctcaagaagatgctaagaaaaacgttgatgtcgaatttagtcaagccataagctacgttaataaaattaaaactagatttgccgaccaacctgatatttacaagcattttctggaaatactacaaacttatcagcgagagcaaaagccaataaacgaagtctacgcacaagtgacgcatcttttccaaaatgctcctgatttactagaagatttcaagaaattcttgccggactcttcagcttctgccaatcagcaggtgcaacatgctcagcaacatgctcaacaacaacatgaggcccaaatgcatgcacaggcacaagctcaggctcaggcacaggcacaggtggaacaacagaagcagcaacagcaattcttgtatccagcttcgggctattacggccatccttctaaccgaggtattccacagcaaaacttgcctcctataggaagcttctcgcctccaacaaacggttcgaccgtacatgaagcctatcaggatcaacagcacatgcaaccaccccacttcatgcccttaccatcgatcgttcaacacgggccaaatatggtacatcaagggatagcgaatgaaaatccacctctatcagatctaagaacgtctctcactgaacagtacgctccttctagtatacaacatcagcagcagcacccgcaaagtattagtcctatagcaaatacgcagtatggtgatatccctgttagaccggaaattgatttagatcctagcattgtgcctgtggtccctgaacccactgagcccatcgaaaacaatatatcgcttaatgaggaagtcactttcttcgaaaaggccaagaggtatatcggcaataaacatttatacactgagtttttgaaaattttaaatttgtactctcaagatatacttgatcttgacgatttagtggaaaaggtagatttctacttgggttccaataaagaactatttacgtggttcaaaaactttgttggctaccaagaaaaaaccaaatgtatcgagaatattgttcatgaaaaacatagattggatttagatttatgtgaggcatttggcccaagttacaagaggctaccaaaaagtgacactttcatgccatgctcaggtagggatgatatgtgttgggaagtcttgaacgatgaatgggttggacatcctgtatgggcttccgaagattcgggatttattgctcatcgtaaaaaccagtatgaggaaacactattcaagatcgaagaggaaagacatgagtatgatttttacattgaatcaaatttaagaactattcaatgtttggaaacaattgtaaataagatcgagaacatgactgagaatgaaaaagccaattttaaactgcctccaggtcttggccatacttcaatgactatttataaaaaagtgataaggaaagtttatgataaggaaagggggttcgagattattgatgctttgcatgagcaccctgcagtgacagccccagtcgttctgaaaaggttaaagcaaaaagacgaagaatggagaagagctcaacgtgaatggaataaagtttggagggagttagaacagaaggtttttttcaagtcattagatcatttaggcttaacatttaaacaggctgacaagaaattattaactacaaagcagttgatatcagagattagcagcatcaaagttgatcaaacaaacaaaaaaattcactggttaactcctaaaccaaagagccagttagattttgatttccctgataaaaacattttctatgatatcttgtgtttggctgacacttttataacccataccacagcctattctaatcccgataaagaaagattgaaagatttactaaaatacttcatctctttgtttttttctatttctttcgaaaaaatcgaagaatcgttgtactcccataagcaaaacgtgtcagaatctagcggatctgacgatggcagttctattgcatcaaggaagaggccctatcaacaagaaatgagtttacttgatattttacacaggagcagatatcaaaagctaaagcgttctaatgatgaagatggcaaagttccccagctctctgaaccacccgaagaagaacctaataccattgaggaggaagagctcatcgatgaagaagctaaaaatccgtggctaactgggaatttagtggaggaagcaaactctcagggtattatccaaaatcgcagtatttttaatctattcgctaatacgaatatttacatatttttccgtcattggacaacgatttatgagcggcttttggaaattaagcaaatgaatgaaagggtcacaaaggaaatcaacacaaggtcgacagttacttttgccaaagatctagatttattatcgagtcaactttccgaaatgggactagattttgttggtgaagacgcgtacaaacaggttttaagactgagtagaaggttgattaatggggatcttgaacatcagtggtttgaagagagtttgcggcaagcttacaataacaaagcgtttaaactctatacaattgataaagtcacccaatcgttggtaaagcatgctcataccttgatgactgacgctaaaactgcggaaataatggctttgttcgttaaagatagaaatgcctccaccacgagtgcgaaggaccaaattatctatcgcttgcaggtgcgctcacatatgtccaacacagaaaatatgtttagaatagagtttgataaaagaactctgcatgtttccattcaatatattgcacttgatgatttgacactaaaggaaccaaaggcagacgaagataaatggaaatattatgtaacatcgtatgctctgccacatccaacagaaggcattccgcacgagaaactgaagataccatttttggaaaggctcatcgaatttggacaagatattgatggaacagaggtagatgaggagttttcccccgaaggcatctctgtatcgacattgaaaattaagatccagcctataacctaccaactgcatattgaaaacgggtcttacgatgtttttacccgtaaggctactaacaaatatcctactattgctaatgataatactcaaaaaggaatggtttctcagaagaaggagttgatatcaaaatttctagactgtgcagttggtttgagaaataatttagatgaggctcaaaaattaagtatgcaaaaaaaatgggagaacctaaaagacagcatagcaaagacgagtgctggaaaccagggaatagagagtgaaaccgaaaaaggtaaaattacgaaacaggagcagtcggataatttggacagctctactgcaagtgtactgcctgcatccattactactgtaccacaagatgataatatagaaacgactgggaatactgaatcttcagacaagggggctaagattcaataa

SEQ ID NO: 322 - protein, 1536 aa, Saccharomyces cerevisiae
MSQVWHNSNSQSNDVATSNDATGSNERNEKEPSLQGNKPGFVQQQQRITLPSLSALSTKEEDRRDSNGQQALTSHAAHILGYPPPHSNAMPSIATDSALKQPHEYHPRPKSSSSSPSINASLMNAGPAPLPTVGAASFSLSRFDNPLPIKAPVHTEEPKSYNGLQEEEKATQRPQDCKEVPAGVQPADAPDPSSNHADANDDNNNNENSHDEDADYRPLNVKDALSYLEQVKFQFSSRPDIYNLFLDIMKDFKSQAIDTPGVIERVSTLFRGYPILIQGFNTFLPQGYRIECSSNPDDPIRVTTPMGTTTVNNNISPSGRGTTDAQELGSFPESDGNGVQQPSNVPMVPSSVYQSEQNQDQQQSLPLLATSSGLPSIQQPEMPAHRQIPQSQSLVPQEDAKKNVDVEFSQAISYVNKIKTRFADQPDIYKHFLEILQTYQREQKPINEVYAQVTHLFQNAPDLLEDFKKFLPDSSASANQQVQHAQQHAQQQHEAQMHAQAQAQAQAQAQVEQQKQQQQFLYPASGYYGHPSNRGIPQQNLPPIGSFSPPTNGSTVHEAYQDQQHMQPPHFMPLPSIVQHGPNMVHQGIANENPPLSDLRTSLTEQYAPSSIQHQQQHPQSISPIANTQYGDIPVRPEIDLDPSIVPVVPEPTEPIENNISLNEEVTFFEKAKRYIGNKHLYTEFLKILNLYSQDILDLDDLVEKVDFYLGSNKELFTWFKNFVGYQEKTKCIENIVHEKHRLDLDLCEAFGPSYKRLPKSDTFMPCSGRDDMCWEVLNDEWVGHPVWASEDSGFIAHRKNQYEETLFKIEEERHEYDFYIESNLRTIQCLETIVNKIENMTENEKANFKLPPGLGHTSMTIYKKVIRKVYDKERGFEIIDALHEHPAVTAPVVLKRLKQKDEEWRRAQREWNKVWRELEQKVFFKSLDHLGLTFKQADKKLLTTKQLISEISSIKVDQTNKKIHWLTPKPKSQLDFDFPDKNIFYDILCLADTFITHTTAYSNPDKERLKDLLKYFISLFFSISFEKIEESLYSHKQNVSESSGSDDGSSIASRKRPYQQEMSLLDILHRSRYQKLKRSNDEDGKVPQLSEPPEEEPNTIEEEELIDEEAKNPWLTGNLVEEANSQGIIQNRSIFNLFANTNIYIFFRHWTTIYERLLEIKQMNERVTKEINTRSTVTFAKDLDLLSSQLSEMGLDFVGEDAYKQVLRLSRRLINGDLEHQWFEESLRQAYNNKAFKLYTIDKVTQSLVKHAHTLMTDAKTAEIMALFVKDRNASTTSAKDQIIYRLQVRSHMSNTENMFRIEFDKRTLHVSIQYIALDDLTLKEPKADEDKWKYYVTSYALPHPTEGIPHEKLKIPFLERLIEFGQDIDGTEVDEEFSPEGISVSTLKIKIQPITYQLHIENGSYDVFTRKATNKYPTIANDNTQKGMVSQKKELISKFLDCAVGLRNNLDEAQKLSMQKKWENLKDSIAKTSAGNQGIESETEKGKITKQEQSDNLDSSTASVLPASITTVPQDDNIETTGNTESSDKGAKIQ

SEQ ID NO: 323 - DNA, 2490 bp, Saccharomyces cerevisiae
atggccaagaggaaatatggcaggtcttattccctcgatgatacagattcctgcagcaataaagtcctgatagtaccaaccggtcaaagctcctctaacgcaatcactgatttctctgtcagaaaggcgcatgcttgcgatagatgcagactgaaaaaaatcaagtgtgacggtttaaaaccgaactgttcaaactgtgcgaaaattgacttcccttgcaaaacctcggataaactgtcgaggagaggtcttccaaaggggtatacagaactactagaaaaagaggtcgtccgtttgacaaatatgaatgcgagttccagcgccaatgcaaattctaatttgccgttcattaatgatacattttattgttttgataattacaacactcagtctgaaaatcaaaggtttttgggacatttgacatggaatattctaactaatacttttcctactcaaaaagcagtagtttttacagacgatcgaaataatattgatctacaactgcaactgttaacaaattttttgaacctgaatggtgactttaatcatctcccaaattttcttttacttaaatatgattataaccttcagtttttgaaaaatttgttgtctgtcattattaaagatttttttaaaaggcaaaattctttgctacttctattataccctacaaatttatggaaaaatttgctattagacaagattaattcaaccgcaatgacaggtgaacccataactctactggcgttactttatattattcaatttacttggtcttgttttgatgatttcaagctttttaaagtcacgaagcttattgtttctctgacaacaaacagcaaattagacttgaaagttttgcaattggttaacttatccatcttttattttatgggcgcctctgttgactcttgtaaaagtaaaagctcgttaacagaacattcaaatgtaaattcagtaatatggaccaatgatttgctaaacctaaactttacaaatattttgaatatgggattgtacataaatcccaaaaatttaattcctatatcaggcaacaataataataataaatctaatgaagaggatgatagaatagtgacattttggtgctttcaattcttaagctcatggtggtccttaattcaaggtttaccaaagtccaactttttaactgaagaatttcaaccgaaatcaatctcggttctagaaatccccaggctgaagccctttgaaattttgttaaacttcatcatatattctttggatggatgtaatttgttgaatatctcatctttaaatgtttcggacccaaatttccaatttttccagaatgaactggaaagctttaaaaaaaatttattactgtggaacctttatcacaatttgagtgatcacgataacttccgattcttaacatccagttcaaataaaaaactaacaacaaatttactacttaagaatttgacgggtctaaatcacaaactcaatcaacctgattttgtggagattcaattaactttattttacttgagtttaaaattaatgactttaaaggaaggggaccaagatttgaagaaagaggatatctcgttagagatattgtccctatattttttaattcttacagatgactctaataatgatgataatcaacagttacaaccacagcaactaaatctctaccattttacgcccttcaatagtattgacattattgacttatgtttaaacaatttaaacaattggtcattatcacttaaatacgaaagtggtcaaaaccagccccactcaagtaaaataaagtttgaaaaatttcaaaactttttaaatcactggtgtccaatatggtactatgatgaattttccacaaacccttttttacaaatcctcaaaatcaatttcaaattacttccttttgagacaatccattactcacaagaagagcaacgattgttaataagtttgaataaattgagatatttggatgccgtatcgagctttaattcaagttcagtcaagtcgaatttcgcgtctaaggtcaatacccagctaaaccttttgcaacactcgagttctaactccaatttcctagatgcgtcaccatacgattttaataaaatttttatgaacaactttgaaaactatgactacgaaacagatgaaggatatgcggaagatgatgatgaagaggatagtgacagtgacaatagcttaccactagaaattccttttaaaaaaagtaaaaataaatgcaagaataggaataaagagctttcacaaaggttatccctatttgaaaacagagatagcaattcggtagatttcaacacagatacaaatttaaatttaaaccctgattcgccatcagttacgtcttctaagaaaaaatatttagatcatattattttagataaccgagacatcgttagcaaccatgactccagtaaacaaaaattcaagatccagaatattttgaactcgaccttctaa

SEQ ID NO: 324 - protein, 829 aa, Saccharomyces cerevisiae
MAKRKYGRSYSLDDTDSCSNKVLIVPTGQSSSNAITDFSVRKAHACDRCRLKKIKCDGLKPNCSNCAKIDFPCKTSDKLSRRGLPKGYTELLEKEVVRLTNMNASSSANANSNLPFINDTFYCFDNYNTQSENQRFLGHLTWNILTNTFPTQKAVVFTDDRNNIDLQLQLLTNFLNLNGDFNHLPNFLLLKYDYNLQFLKNLLSVIIKDFFKRQNSLLLLLYPTNLWKNLLLDKINSTAMTGEPITLLALLYIIQFTWSCFDDFKLFKVTKLIVSLTTNSKLDLKVLQLVNLSIFYFMGASVDSCKSKSSLTEHSNVNSVIWTNDLLNLNFTNILNMGLYINPKNLIPISGNNNNNKSNEEDDRIVTFWCFQFLSSWWSLIQGLPKSNFLTEEFQPKSISVLEIPRLKPFEILLNFIIYSLDGCNLLNISSLNVSDPNFQFFQNELESFKKNLLLWNLYHNLSDHDNFRFLTSSSNKKLTTNLLLKNLTGLNHKLNQPDFVEIQLTLFYLSLKLMTLKEGDQDLKKEDISLEILSLYFLILTDDSNNDDNQQLQPQQLNLYHFTPFNSIDIIDLCLNNLNNWSLSLKYESGQNQPHSSKIKFEKFQNFLNHWCPIWYYDEFSTNPFLQILKINFKLLPFETIHYSQEEQRLLISLNKLRYLDAVSSFNSSSVKSNFASKVNTQLNLLQHSSSNSNFLDASPYDFNKIFMNNFENYDYETDEGYAEDDDEEDSDSDNSLPLEIPFKKSKNKCKNRNKELSQRLSLFENRDSNSVDFNTDTNLNLNPDSPSVTSSKKKYLDHIILDNRDIVSNHDSSKQKFKIQNILNSTF

SEQ ID NO: 325 - DNA, 2316 bp, Saccharomyces cerevisiae
atgtctgtgcgaaacctcaccaataatcgtcattccaacagcgaaaatagtgtttccggaagcgaaaactccttttattcctcgaatgagcaatcaagacaaagctcatcattagaacctgcagatggtcagaacgttagggtgagcggtaatcctttccttggaagtgaagaatttgacgaagattataattcacccagtggagacgatgagcggcgtggggcaaatgaatattccagttcttcatccataaattataataacgatcctaacagcgatacttctcttctggctaatgaaaagaactcacccgagagaaatggtcaaagaatgtcagactataagggctattatgctaagactaacctaacttctgctaataacttaaacaatcataataacaataattataagaacattataagcagtagtaacgataatagttttgcatcacatttacagccgccggacagaaacttaccgtctcatccttcttcaaataatatgagtagcttttctaacaacagcttaattaagtctccaccaccttttgacagatatccgctagtaggaacgaggcatatttcagcggctcaatctcagtcgcagaaccttataaatgaaaagaaaagagcgaatatgactggctcatcttcttctgctcacgactcttcattatcatccaccaacttatacatgggcgaacaggatttttcgccctttggcggttatccagcttccttctttccgttaacgttggacgaaaaggaagacgatgactacattcataatccaaatgtcgaggaagaagcaaagttagatagaaggaggttcgttgacgacttcaaacacatggatagaagatctttcttggggcttctgggtattctatttttatttatggctggtatatttattttcattgtattacctgcaattacattttccggggtagtttatcatcatgaacatgttcatgcggcaaattcagcaggatcgtcgtcttctaatactacatccaagtcattgactgaatatcaatatcctcaacttgcggctataaggacaactttagttgatccagacacacctgacagtgcgaagacaagagtagcgaaagatggatctaaatggcagctggtgttttccgatgaatttaatgctgaaggtaggaccttttacgatggcgatgaccagttttggacagctcctgacatccactacgacgctacgaaagatcttgaatggtactcaccagatgccgttacaactacaaatggtaccttgacgttgagaatggatgcattcagaaaccatgacctttattacagatctggtatggtacagagctggaacaaactctgctttacagaaggtgcgttagaagtttccgcgaacctccctaattatggtcgagttacaggattatggcctggtatgtggaccatggggaacttgggcagaccaggttatttggcgagtactcaaggtgtttggccttattcatatgaagcatgtgacgctggtataacaccaaaccaaagttccccagatggtatttcttacttgccgggacaaaagttgagtgtttgtacttgtgataatgaggatcatccaaatcagggagttggaagaggcgcaccggaaatagatattttagaaggtgaagctgatacaattttgggtgttggtgttgcgtcacaatctctacaaattgctccatttgatatatggtacatgcccgattatgacttcatcgaagtttataatttcaccacaacaactatgaatacttacgctggtgggccttttcaacaagctgtctcagcaatatccactttaaatgtaacatggtatgaatttggggaggaagcaggttattttcaaaagtatgccattgaatatctcaatgatgacgacaacggatatattcgttggtttgtgggagagaaccctactttcacactatatgctacttctttacatcctagtggtaatattgactggaggagaataagtaaggagccaatgtcagcgattttaaacttaggtatttccaacaactgggcctatatcgactggcaatatatatttttcccggtgacaatgtcaatagattacgtccgattataccagccgaagggttctacgtccattacttgtgatcctgaggactacccgacatatgattatatccaaagccatctaaatgcatattataacgccaatttaactgattgggaacaggctggatatactttcccaaaaaatattctaacaggaggttgtagtagttcaaaattctcattatcctga

SEQ ID NO: 326 - protein, 771 aa, Saccharomyces cerevisiae
MSVRNLTNNRHSNSENSVSGSENSFYSSNEQSRQSSSLEPADGQNVRVSGNPFLGSEEFDEDYNSPSGDDERRGANEYSSSSSINYNNDPNSDTSLLANEKNSPERNGQRMSDYKGYYAKTNLTSANNLNNHNNNNYKNIISSSNDNSFASHLQPPDRNLPSHPSSNNMSSFSNNSLIKSPPPFDRYPLVGTRHISAAQSQSQNLINEKKRANMTGSSSSAHDSSLSSTNLYMGEQDFSPFGGYPASFFPLTLDEKEDDDYIHNPNVEEEAKLDRRRFVDDFKHMDRRSFLGLLGILFLFMAGIFIFIVLPAITFSGVVYHHEHVHAANSAGSSSSNTTSKSLTEYQYPQLAAIRTTLVDPDTPDSAKTRVAKDGSKWQLVFSDEFNAEGRTFYDGDDQFWTAPDIHYDATKDLEWYSPDAVTTTNGTLTLRMDAFRNHDLYYRSGMVQSWNKLCFTEGALEVSANLPNYGRVTGLWPGMWTMGNLGRPGYLASTQGVWPYSYEACDAGITPNQSSPDGISYLPGQKLSVCTCDNEDHPNQGVGRGAPEIDILEGEADTILGVGVASQSLQIAPFDIWYMPDYDFIEVYNFTTTTMNTYAGGPFQQAVSAISTLNVTWYEFGEEAGYFQKYAIEYLNDDDNGYIRWFVGENPTFTLYATSLHPSGNIDWRRISKEPMSAILNLGISNNWAYIDWQYIFFPVTMSIDYVRLYQPKGSTSITCDPEDYPTYDYIQSHLNAYYNANLTDWEQAGYTFPKNILTGGCSSSKFSLS

SEQ ID NO: 327 - DNA, 1869 bp, Saccharomyces cerevisiae
atgagcttttccaccataaatagcaacgtcaataaaaccaccggcgatagcaataataacaccaccgagaacagttcgactgcagaccttttaggaatggacttgttgcagagcgggcctcgactgatgaacacgatgcagccaaacaactcttctgacatgctgcacattaacaacaagactaataacgttcaacaaccagctggaaacacaaatatcagcagtgctaatgcgggagcaaaggctccagcaaatgagttcgtaagaaaactgttcaggatactggaaaacaatgaatatcctgacattgtaacttggactgagaacggcaaaagtttcgtcgttttggacacaggaaagttcactacgcatatattgcctaatcacttcaaacattcaaattttgcatcttttgtaaggcaactaaacaagtatgactttcacaaggttaagagaagtcccgaggaaagacagagatgtaaatatggcgaacaaagttgggagtttcagcatccagaatttagagtccattacggaaaaggtctcgataacatcaaaaggaaaattccggcgcaaaggaaagtgcttttggatgaatctcaaaaggctcttttgcatttcaatagtgaaggcactaaccccaacaatccttctgggtctcttttgaatgaatccaccacagagctgttgttaagcaataccgtaagtaaagatgcatttggaaatctaagaaggcgagtagacaaactacaaaaggagttggatatgtccaaaatggagagttatgctactaaagtagaactacaaaagttgaactcgaaatacaatacggttatcgaaagtttgataacattcaagaccataaatgaaaatttactcaacaacttcaacactctgtgttccactttggcaaataatggtattgaagtgccaatatttggcgacaatggaaaccgtaacccaactggtaataccaacccagcaacaacaacagctatccaaagcaacaacaacaccaacaatgcttctccggcaacatctacagtttccttacaactacctaatttacccgatcagaatagcctaacaccaaatgctcaaaataacacagtcacgctacgaaaaggtttccatgtactgttggtggaagatgacgcagtgtctatacagttgtgttcaaaatttttacggaaatatggctgtactgtccaagttgtcagcgacggtctttcagctatctcaacactagagaagtataggtatgatttggttttaatggacattgttatgccaaacctagatggtgccacagcgacatccattgtcagaagttttgataatgagactcccatcattgccatgacaggtaacattatgaatcaagacttgatcacatacttacaacatggaatgaatgatatcttggccaaaccattcacgagggatgatttacactcaattttaatacgttatctaaaggaccgtattcctttatgcgaacagcaattaccacctcgcaactcttcgccacaaactcattccaacaccaatactgctaattcgaatcctaatacgattaatgaacagtcgttagccatgttaccacaagataatccgtcaactactacccctgttaccccaggtgcctctatatcttctgcacagcatgttcaacaaggtcaacaagaacagcagcatcaaattttccatgctcagcagcagcagcagcatcacaacgccattgctaatgctaggtcagacgtagccataccgaatttggaacatgaaatcaacactgtaccacattcctcaatgggttccactccgcaattaccacaatctacacttcaagaaaaccagctatcataa

SEQ ID NO: 328 - protein, 622 aa, Saccharomyces cerevisiae
MSFSTINSNVNKTTGDSNNNTTENSSTADLLGMDLLQSGPRLMNTMQPNNSSDMLHINNKTNNVQQPAGNTNISSANAGAKAPANEFVRKLFRILENNEYPDIVTWTENGKSFVVLDTGKFTTHILPNHFKHSNFASFVRQLNKYDFHKVKRSPEERQRCKYGEQSWEFQHPEFRVHYGKGLDNIKRKIPAQRKVLLDESQKALLHFNSEGTNPNNPSGSLLNESTTELLLSNTVSKDAFGNLRRRVDKLQKELDMSKMESYATKVELQKLNSKYNTVIESLITFKTINENLLNNFNTLCSTLANNGIEVPIFGDNGNRNPTGNTNPATTTAIQSNNNTNNASPATSTVSLQLPNLPDQNSLTPNAQNNTVTLRKGFHVLLVEDDAVSIQLCSKFLRKYGCTVQVVSDGLSAISTLEKYRYDLVLMDIVMPNLDGATATSIVRSFDNETPIIAMTGNIMNQDLITYLQHGMNDILAKPFTRDDLHSILIRYLKDRIPLCEQQLPPRNSSPQTHSNTNTANSNPNTINEQSLAMLPQDNPSTTTPVTPGASISSAQHVQQGQQEQQHQIFHAQQQQQHHNAIANARSDVAIPNLEHEINTVPHSSMGSTPQLPQSTLQENQLS

SEQ ID NO: 329 - DNA, 1137 bp, Saccharomyces cerevisiae
atgagaccgaacaaaacaagtctgcttctggcgttattatccattttatcgcaagcgaacgcctatgaatacgtgaattgttttagctcactaccctctgacttttcaaaggccgattcatataactggcagtcgagttcacactgtaacagtgagtgtagcgcaaaaggtgcaagctactttgccctttataatcattcagaatgttattgtggtgatactaatccatctggttcggaatctacttcctcttcatgtaatacgtattgctttggttacagcagtgagatgtgtggtggtgaagatgcctattctgtgtaccaacttgactctgacacaaatagcaatagcataagcagctcagattcaagtacggagtctacttctgcgtcgtcttccacaacttcttcaacaacgtcctccacaacatcaactacatcatcgactacatcatcaactacatcatcaatggcgtcttcctctacagtacagaattcccccgagtcaactcaagcagctgcctctatttcaacgtcacagagttcgagcactgtaacgtcagaaagctcgctaacttcggatactttggcaacgagcagtactagctctcaatcacaggacgccacttcgataatctattccactacttttcacactgagggcggttccacaatttttgtcacgaacaccatcacggcaagtgcacagaattcaggatcggccacaggtacagctggatctgactctacgagtggaagtaaaactcataaaaagaaagccaatgtaggggcaattgtaggcggcgttgtaggtggtgtagtgggagccgtagccattgctctttgtatcttgttgattgtcagacacattaatatgaagcgggaacaagacaggatggaaaaggaataccaagaggcgataaaaccagttgagtaccctgataaactatacgcctcttcattttcatctaatcacgggccctcttcaggtagcttcgaggaggagcacaccaaagggcaaactgatattaaccctttcgacgactcaaggagaataagtaacggaacattcataaatggcggaccaggagggaaaaacaacgttttaacagtggtcaatccagacgaagctgattga

SEQ ID NO: 330 - protein, 378 aa, Saccharomyces cerevisiae
MRPNKTSLLLALLSILSQANAYEYVNCFSSLPSDFSKADSYNWQSSSHCNSECSAKGASYFALYNHSECYCGDTNPSGSESTSSSCNTYCFGYSSEMCGGEDAYSVYQLDSDTNSNSISSSDSSTESTSASSSTTSSTTSSTTSTTSSTTSSTTSSMASSSTVQNSPESTQAAASISTSQSSSTVTSESSLTSDTLATSSTSSQSQDATSIIYSTTFHTEGGSTIFVTNTITASAQNSGSATGTAGSDSTSGSKTHKKKANVGAIVGGVVGGVVGAVAIALCILLIVRHINMKREQDRMEKEYQEAIKPVEYPDKLYASSFSSNHGPSSGSFEEEHTKGQTDINPFDDSRRISNGTFINGGPGGKNNVLTVVNPDEAD

SEQ ID NO: 331 - DNA, 3663 bp, Saccharomyces cerevisiae
atgcgatttggcctgccatcaaaattggaactcactcctccgtttaggataggcatccgaactcaactaacggcactagttagtatagtggctttgggctcactgattattctggctgtaacgacaggggtctattttacctcgaactataaaaatttaaggtccgatagactgtacattgccgctcagttaaagtcatcacagattgaccaaactctaaactacttatattaccaggcgtactatttggcatcaagagacgccctgcaaagctcactaacaagttacgttgcaggtaacaagagtgcagataattgggtagattccttgagtgtgattcaaaaatttttgagctcttcaaacttgttttatgttgctaaagtttacgattcttcatttaatgctgttttgaacgctacgaataatggaactggtgatctaattccagaagatgttttagacagtttgttcccattatccaccgatacaccgctaccttcttcactggaaactataggtatattgacggatccagtactaaatagcaccgactatttgatgtctatgtctttacctatttttgccaatccttctattatcttgactgattcaagggtttacggatacattactataataatgtcggcagagggtctgaaaagtgtgttcaacgatacaactgctttagaacattccacaattgccattatttctgcagtatataatagtcaaggcaaagcttcagggtatcattttgtctttccaccgtatggatcacgatcagacctcccgcaaaaagttttttctataaaaaatgatacattcattagtagcgcatttagaaacgggaagggagggtctttgaaacaaaccaatatcctttctacacggaatactgctttaggctattcaccatgttcgtttaacctagttaattgggtcgcgatagtttcacagcctgagtcggttttcctttctccagcaacgaaactagcaaaaatcatcaccggcactgtcatcgctattggtgtctttgtcattttgttaacccttcctctagcacactgggcagtgcaaccaattgtacgtctacaaaaggcaactgaattaattacagaggggagaggccttcgaccgagcaccccaagaacgataagcagagccagttcattcaaaagaggatttagttctggatttgctgttccttcttcgttattacaatttaatactgctgaagctggcagcaccacaagcgtaagtggccatggaggcagtggccatggcagtggtgcagctttttcagcaaatagtagcatgaaaagcgctataaaccttggaaatgagaaaatgtcacctccagaggaggagaacaaaataccgaataaccacaccgatgctaaaatatcaatggatggctcgctaaatcacgatttgcttggaccacattccttgagacataatgacactgacagaagttccaatagatctcacattctcacaacttctgcaaatttaactgaagctaggctaccagattatagaagactattttctgatgaactttccgatttaacagaaaccttcaatactatgacagacgcattagaccaacattatgctcttctagaagaaagagttagggcgaggacaaaacaactcgaagctgccaagattgaggcagaggccgcaaatgaagcaaaaaccgtctttattgccaatatttcgcacgaattgagaacgcctttaaatggtattctgggtatgacggctatttcaatggaagaaaccgatgttaacaaaataagaaatagtttaaaactcatttttagatcaggtgagcttttgcttcatattctaacggaattgttaactttttccaaaaacgttcttcaaagaacgaaactggagaaaagagatttttgcattaccgatgttgccttacaaataaaatcgatatttggtaaagttgcaaaggatcagcgtgttcgtctttcaatatcattgtttcctaatttgataaggacaatggttctttggggtgattccaacagaattattcaaattgtgatgaatctagtgtccaatgcactaaagttcacccctgtagatggtaccgttgatgtaagaatgaaactgttgggtgaatacgacaaagaattaagcgagaagaagcaatacaaagaagtgtatatcaaaaaagggacagaagtaaccgaaaatttagaaactacagataaatacgatcttccaactttatcgaaccataggaaaagtgtcgatttagaatccagcgctacttccctaggaagtaatagagacacttcgacaattcaggaagagataacaaaaagaaatactgttgcgaatgaaagtatctataagaaagtgaatgacagggaaaaagcttcgaatgatgatgtatcttctatagtatcaacaactaccagctcgtatgataacgctatcttcaatagtcagttcaataaagcacctggctcagatgatgaagaaggtggtaacctaggaagacctatcgaaaaccccaaaacgtgggttatttctattgaagtggaagacactgggcctggtattgacccttccttacaagaatctgtatttcatccatttgttcaaggtgatcaaacattgtccaggcaatatggtggtactggcttaggtctatcaatctgtagacagttagcaaatatgatgcatggaacgatgaaattagagtcgaaagtaggtgttggtagtaaattcacttttaccttgccattaaatcaaactaaagagatcagttttgcagatatggagtttccttttgaggacgaatttaatcctgagagtagaaagaacagaagagtcaagtttagtgttgctaaaagcatcaagagccgacaatccacatcatctgttgcaacaccagctacaaatagaagtagcctaaccaacgacgtgctaccggaggtaagaagtaaaggtaagcatgagacgaaagatgttggaaatcctaacatgggaagagaagaaaaaaacgacaatggagggcttgaacaactgcaggaaaaaaatattaaaccttctatatgtcttacaggtgctgaagttaacgaacaaaattccttgtcttctaagcatcgttctcgacatgaaggtctaggttctgtcaatcttgatagaccatttttgcaaagtactggtacagccacatcaagtagaaacatccccacagtcaaagacgacgataaaaatgaaacaagtgtcaaaattttggttgtagaagataatcatgtaaatcaggaagttatcaaaagaatgttgaacttggagggcattgaaaatattgaactggcttgcgatggccaagaagcattcgacaaagttaaagaattgacatctaagggcgaaaattataatatgattttcatggatgtccagatgcctaaagtggatggtttactttctaccaagatgataaggcgcgatttaggttatacctcacctattgtcgctctaaccgcttttgctgacgatagcaacattaaagaatgtttggaatcaggaatgaacggatttttatcgaaaccaatcaaaagaccaaaattgaaaactattcttactgagttttgtgcagcatatcagggaaagaaaaataacaaatga

SEQ ID NO: 332 - protein, 1220 aa, Saccharomyces cerevisiae
MRFGLPSKLELTPPFRIGIRTQLTALVSIVALGSLIILAVTTGVYFTSNYKNLRSDRLYIAAQLKSSQIDQTLNYLYYQAYYLASRDALQSSLTSYVAGNKSADNWVDSLSVIQKFLSSSNLFYVAKVYDSSFNAVLNATNNGTGDLIPEDVLDSLFPLSTDTPLPSSLETIGILTDPVLNSTDYLMSMSLPIFANPSIILTDSRVYGYITIIMSAEGLKSVFNDTTALEHSTIAIISAVYNSQGKASGYHFVFPPYGSRSDLPQKVFSIKNDTFISSAFRNGKGGSLKQTNILSTRNTALGYSPCSFNLVNWVAIVSQPESVFLSPATKLAKIITGTVIAIGVFVILLTLPLAHWAVQPIVRLQKATELITEGRGLRPSTPRTISRASSFKRGFSSGFAVPSSLLQFNTAEAGSTTSVSGHGGSGHGSGAAFSANSSMKSAINLGNEKMSPPEEENKIPNNHTDAKISMDGSLNHDLLGPHSLRHNDTDRSSNRSHILTTSANLTEARLPDYRRLFSDELSDLTETFNTMTDALDQHYALLEERVRARTKQLEAAKIEAEAANEAKTVFIANISHELRTPLNGILGMTAISMEETDVNKIRNSLKLIFRSGELLLHILTELLTFSKNVLQRTKLEKRDFCITDVALQIKSIFGKVAKDQRVRLSISLFPNLIRTMVLWGDSNRIIQIVMNLVSNALKFTPVDGTVDVRMKLLGEYDKELSEKKQYKEVYIKKGTEVTENLETTDKYDLPTLSNHRKSVDLESSATSLGSNRDTSTIQEEITKRNTVANESIYKKVNDREKASNDDVSSIVSTTTSSYDNAIFNSQFNKAPGSDDEEGGNLGRPIENPKTWVISIEVEDTGPGIDPSLQESVFHPFVQGDQTLSRQYGGTGLGLSICRQLANMMHGTMKLESKVGVGSKFTFTLPLNQTKEISFADMEFPFEDEFNPESRKNRRVKFSVAKSIKSRQSTSSVATPATNRSSLTNDVLPEVRSKGKHETKDVGNPNMGREEKNDNGGLEQLQEKNIKPSICLTGAEVNEQNSLSSKHRSRHEGLGSVNLDRPFLQSTGTATSSRNIPTVKDDDKNETSVKILVVEDNHVNQEVIKRMLNLEGIENIELACDGQEAFDKVKELTSKGENYNMIFMDVQMPKVDGLLSTKMIRRDLGYTSPIVALTAFADDSNIKECLESGMNGFLSKPIKRPKLKTILTEFCAAYQGKKNNK

SEQ ID NO: 333 - DNA, 1455 bp, Saccharomyces cerevisiae
atggctgataagatagagaggcatactttcaaggtcttcaatcaagatttcagtgtagataagaggtttcaacttatcaaagaaatagggcatggagcatacggcatagtgtgttcagcgcggtttgcagaagctgccgaagataccacagttgccatcaagaaagtgacaaacgttttttcgaagaccttactatgtaaaagatccctacgtgagctaaagcttttgagacatttcagaggccacaaaaatattacatgtctttatgatatggatattgttttttatccagacgggtctatcaatggactatatctttatgaggaacttatggaatgtgatatgcaccaaatcatcaaatccggtcaacctttgacggatgctcactatcaaagtttcacataccaaatattatgtggtttaaagtatattcattctgcagatgtcttgcatcgtgatttgaagcccggcaatttgcttgtcaatgcagattgtcaattgaaaatctgtgattttgggttagctagaggttattcggagaatcctgtcgaaaacagtcaatttttgacggagtacgtggccactagatggtatagagctccggaaataatgttgagttaccaaggatataccaaggcgattgacgtatggtcagctggctgtattttagcggagtttcttggtggaaagccaatcttcaaaggaaaggattacgttaatcaattgaatcaaatattacaagttttagggacacccccagacgaaactttaagaaggattggttctaaaaatgttcaggactacatacatcaattaggtttcattccaaaagtaccttttgtcaatttatacccaaatgccaattcacaagcattagacttattggagcaaatgctcgcgtttgaccctcaaaagagaattaccgtggatgaggccctggagcatccttacttgtctatatggcatgatccagctgacgaacctgtgtgtagtgaaaaattcgaatttagttttgaatcggttaatgatatggaggacttaaaacaaatggttatacaagaagtgcaagatttcaggctgtttgtgagacaaccgctattagaagagcaaaggcaattacaattacagcagcagcaacagcagcagcaacagcaacagcaacagcaacagcagccttcagatgtggataatggcaacgccgcagcgagtgaagaaaattatccaaaacagatggccacgtctaattctgttgcgccacaacaagaatcatttggtattcactcccaaaatttgccaaggcatgatgcagatttcccacctcgacctcaagagagtatgatggagatgagacctgccactggaaataccgcagatattccgcctcagaatgataacggcacgcttctagaccttgaaaaagagctggagtttggattagatagaaaatatttttag

SEQ ID NO: 334 - protein, 484 aa, Saccharomyces cerevisiae
MADKIERHTFKVFNQDFSVDKRFQLIKEIGHGAYGIVCSARFAEAAEDTTVAIKKVTNVFSKTLLCKRSLRELKLLRHFRGHKNITCLYDMDIVFYPDGSINGLYLYEELMECDMHQIIKSGQPLTDAHYQSFTYQILCGLKYIHSADVLHRDLKPGNLLVNADCQLKICDFGLARGYSENPVENSQFLTEYVATRWYRAPEIMLSYQGYTKAIDVWSAGCILAEFLGGKPIFKGKDYVNQLNQILQVLGTPPDETLRRIGSKNVQDYIHQLGFIPKVPFVNLYPNANSQALDLLEQMLAFDPQKRITVDEALEHPYLSIWHDPADEPVCSEKFEFSFESVNDMEDLKQMVIQEVQDFRLFVRQPLLEEQRQLQLQQQQQQQQQQQQQQQQPSDVDNGNAAASEENYPKQMATSNSVAPQQESFGIHSQNLPRHDADFPPRPQESMMEMRPATGNTADIPPQNDNGTLLDLEKELEFGLDRKYF

SEQ ID NO: 335 - DNA, 1359 bp, Saccharomyces cerevisiae
atgggtagaagaaaaattgaaattgaacctatcaaagatgatagaaatcgtacagttactttcataaagcgaaaagcaggactatttaaaaaggctcatgaattgtcagtactttgccaagtagacattgctgtcattattttaggatccaataatacattctacgaatactcttctgttgatatgagtaacctgcttaatgttcatcaaaacaacactgatcttcctcataatatcatagaaccatctgattatggtgactatgtgaaaaaaccacgtgttgttctgaatgaaaggaagcgcaggcgaagaagagcaaccgtgttgcaaccagcttcccattctgggagttgtacagtttcgagtcaagattcctccagtgtacaaaacaatgggaatttaagcgctccgttggcgtcaaatgacgccgggaacgctggtgtaagtacaccattggtgcattgccacggagcaatatcacgtagcggatccaatcattctgactgtgcaagaaatagtgcagattatcaaatgttgcaaggcggtttaaattctggtgggagttttcatgctaatgattataaagaaagcgtagaccaacagcatgttgcaaacgaggctattcataggaattttatgaacaagaggattaggccggatactcatttactactttctgaatctaaccactctaattatcataatttttacccgtcgccttacgagaatttgccaaagccttcattgcctgcaagtttagtgggcaatattccatcctttcaatcgcaatttgtacaggttattccggcaaatagtaacccaatgggaaaaggatttaatgggacgggtgacagcgagagctttgaagcaaagcaaaagatacacccgacagttgctatatcaaatactttggaaggtccagctccagtgcaggcgatggtccatcacctgcaccaactgaacagcaatagaggaaagctctcagggaagccatatttaaagctaaatattccgaaggccacaaatgacgcttgccagaggtcgccagcaatgtattcaggaaccgcatcaccgaaaacggatgtacaagccactcccaatcaaatgctcgccagcaacatgtcctcccctctttctcgttcaaagtttttgggattcaagaacaatgatatggacgacttatatcataatggccgatgtggcagcacttatgtaaataacaaaacattctttctgaaaccgccaattggaagaccgcctaaatttccgaaaagcccgtcttcatctattgtggtttttccttcctcggtagctagttcaactttgaaatccacgagttcgacaaactctccagattaa

SEQ ID NO: 336 - protein, 452 aa, Saccharomyces cerevisiae
MGRRKIEIEPIKDDRNRTVTFIKRKAGLFKKAHELSVLCQVDIAVIILGSNNTFYEYSSVDMSNLLNVHQNNTDLPHNIIEPSDYGDYVKKPRVVLNERKRRRRRATVLQPASHSGSCTVSSQDSSSVQNNGNLSAPLASNDAGNAGVSTPLVHCHGAISRSGSNHSDCARNSADYQMLQGGLNSGGSFHANDYKESVDQQHVANEAIHRNFMNKRIRPDTHLLLSESNHSNYHNFYPSPYENLPKPSLPASLVGNIPSFQSQFVQVIPANSNPMGKGFNGTGDSESFEAKQKIHPTVAISNTLEGPAPVQAMVHHLHQLNSNRGKLSGKPYLKLNIPKATNDACQRSPAMYSGTASPKTDVQATPNQMLASNMSSPLSRSKFLGFKNNDMDDLYHNGRCGSTYVNNKTFFLKPPIGRPPKFPKSPSSSIVVFPSSVASSTLKSTSSTNSPD

SEQ ID NO: 337 - DNA, 1902 bp, Saccharomyces cerevisiae
atgagcagtaacaacaacacaaacacagcacctgccaatgcaaattctagccaccaccaccaccatcaccaccatcaccaccaccatcacggtcatggcggaagcaactcgacgctaaacaatcccaagtcgtccttagcggatggtgcacatatcgggaactaccaaatcgtcaaaacgctgggagaggggtcctttggtaaagttaaattggcatatcataccactacgggccaaaaagttgctctaaaaatcattaataagaaggttttggcaaagagtgatatgcagggcagaattgaaagagaaatatcttatctgagactcttaagacacccccacatcatcaaactgtatgatgttatcaaatccaaagatgaaatcattatggttatagagtacgccgggaacgaattgtttgactatattgttcagagagacaaaatgagcgagcaagaggcaagaagatttttccagcagatcatcagtgccgtcgagtactgccataggcacaaaattgtccatagagatctgaagcctgaaaacttactactagatgagcatctgaatgtaaagattgccgattttggtttgtcaaacatcatgactgatggtaatttcttaaagacttcttgtggttctcccaattatgcggctcctgaagttatcagcggtaagctgtacgcaggcccagaagtggacgtgtggtcatgtggggttatcctttatgttatgctttgtcgtcgtctaccgtttgacgatgaaagcatcccagtgcttttcaagaatatcagcaacggtgtttacaccttgcctaaatttttatctcctggagctgctgggctaatcaaaagaatgttaatcgttaatccattgaacagaataagcattcatgaaattatgcaagacgattggttcaaagttgacctgccagaatatctacttccaccagatttgaaaccacacccagaagaagagaatgaaaataatgactcaaaaaaggatggcagcagcccagataacgatgaaattgatgacaaccttgtcaatattttatcatcgaccatgggttacgaaaaagacgagatttatgagtccttagaatcatcagaagacactcctgcattcaacgaaattagggacgcgtacatgttgattaaggagaataaatctttgatcaaggatatgaaggcaaacaaaagcgtcagtgatgaactggatacctttctgtcccagtcacctccaacttttcaacaacaaagcaaatcccatcaaaagagtcaagtagatcatgaaactgccaagcaacacgcaagaaggatggcaagtgctatcactcaacaaaggacatatcaccaatcacccttcatggatcagtataaagaagaagactctacagtttccattttgcctacatctttacctcagatccacagagctaatatgttagcacaaggttcgccagctgcctctaaaatatctcctcttgtaacgaaaaaatctaaaacgagatggcattttggtatacgatctcgctcatatccattagacgttatgggtgaaatttatattgccttgaagaatttgggtgccgaatgggccaagccatctgaagaggatttatggactatcaaattaaggtggaaatatgatattggaaacaagacaaacactaatgaaaaaatacctgatttaatgaaaatggtaattcaattatttcaaattgaaaccaataattatttggtggatttcaaatttgacggctgggaaagtagttatggagatgatactactgtttctaatatttctgaagatgaaatgagtactttttcagcctacccatttttacatttaacaacaaaactaattatggaattagccgttaacagtcaaagcaattga

SEQ ID NO: 338 - protein, 633 aa, Saccharomyces cerevisiae
MSSNNNTNTAPANANSSHHHHHHHHHHHHHGHGGSNSTLNNPKSSLADGAHIGNYQIVKTLGEGSFGKVKLAYHTTTGQKVALKIINKKVLAKSDMQGRIEREISYLRLLRHPHIIKLYDVIKSKDEIIMVIEYAGNELFDYIVQRDKMSEQEARRFFQQIISAVEYCHRHKIVHRDLKPENLLLDEHLNVKIADFGLSNIMTDGNFLKTSCGSPNYAAPEVISGKLYAGPEVDVWSCGVILYVMLCRRLPFDDESIPVLFKNISNGVYTLPKFLSPGAAGLIKRMLIVNPLNRISIHEIMQDDWFKVDLPEYLLPPDLKPHPEEENENNDSKKDGSSPDNDEIDDNLVNILSSTMGYEKDEIYESLESSEDTPAFNEIRDAYMLIKENKSLIKDMKANKSVSDELDTFLSQSPPTFQQQSKSHQKSQVDHETAKQHARRMASAITQQRTYHQSPFMDQYKEEDSTVSILPTSLPQIHRANMLAQGSPAASKISPLVTKKSKTRWHFGIRSRSYPLDVMGEIYIALKNLGAEWAKPSEEDLWTIKLRWKYDIGNKTNTNEKIPDLMKMVIQLFQIETNNYLVDFKFDGWESSYGDDTTVSNISEDEMSTFSAYPFLHLTTKLIMELAVNSQSN

SEQ ID NO: 339 - DNA, 5112 bp, Saccharomyces cerevisiae
atgaacataccacagcgtcaatttagcaacgaagaggtcaaccgctgctatttaagatggcagcatttgagaaatgaacacggaatgaacgctccgagtgtgccggaatttatctatttgactaaagtgttgcaatttgctgccaagcagcgacaagaattacaaatgcaacgccaacagcaaggcatttcaggttctcagcaaaatattgttccaaattcttcagatcaagcagaactgccgaataatgcttcctcgcacatttctgcttctgcttccccgcatttagctccgaatatgcaattgaatggaaatgagacctttagcacttctgctcatcaatcaccaatcatgcaaacacagatgccattaaatagcaatggtggtaataacatgctaccacaacggcaatcttcggttggttcattaaatgcaactaatttttcaccaacaccagcaaacaatggagaaaatgctgcggagaaaccagataactcaaaccataataacttaaaccttaataattccgagcttcaaccgcaaaatcgatcattacaagaacacaacatacaggattcaaatgtgatgccaggttcgcagataaattctcctatgccccagcaggcgcagatgcagcaggcacaattccaagcacaacaggcgcaacaagcgcaacaggcacaacaggcacaacaagcacaagcgagactgcaacaggggagaagattacccatgacaatgtttactgccgagcaatccgaactgttaaaggcccaaatcacatctctaaaatgtctagtaaatagaaagcctattccgtttgaatttcaggctgttatccaaaaatctattaaccatcctccagatttcaaaagaatgttactgtctttgagtgagtttgcgagaagaagacaacccacagatcaaaataaccaatcaaatctcaatggcggcaacaatacgcagcaacccggcaccaattcccactacaataacactaacactgacaacgtttctgggcttaccagaaatgcacctttagatagcaaagacgaaaattttgcatctgtttcaccagctggtccatctagtgtacataatgcgaagaatggcaccctcgataaaaattcgcaaactgtaagtggcactccaatcacgcaaacagaatcgaaaaaagaggaaaacgaaaccatttcaaacgtagctaaaacagctcctaatagtaataagacccacaccgagcaaaataacccgccaaaaccgcagaaacccgttcctttaaacgtccttcaagatcaatataaggaaggaataaaagtggtagatatagatgatcctgatatgatggttgattcttttacgatgcccaatatctcacatagtaatatcgattatcagactttattggccaattcggatcatgcaaagtttactattgaacctggcgttctaccggttggtattgacacacataccgctactgacatttaccaaactttaattgcattgaacctagatactacggtaaatgactgtttggataagctactaaatgacgaatgtacggaatcaaccagggaaaatgctctttacgattactacgccttacaattattaccgttacaaaaagccgtaagaggtcatgtattacaatttgaatggcatcaaaattctttattaaccaatacacatccaaattttctttcgaaaataagaaacatcaacgttcaagatgcattgctaacaaaccaactttataagaatcatgaattacttaagttagaaaggaagaagactgaggcagtggccagattaaagtcgatgaataaatccgccatcaatcaatataatagaagacaagataaaaagaataaaaggttgaagtttggccatagactcattgctacgcatactaatttagaaagggatgagcaaaagagagctgaaaaaaaggcaaaagaacgtttacaggctttaaaggcgaacgatgaggaagcctatataaaattattagaccaaaccaaagatacaagaattacacatcttctaaggcaaacaaacgcatttttagattctttaacaagagccgtgaaagatcaacaaaagtacactaaagaaatgattgattcccacataaaggaagcatcggaggaagtggatgatttgtccatggtccccaagatgaaggatgaagaatatgatgacgacgacgacaattctaacgtcgattattacaatgtcgcacatagaattaaagaagatatcaagaagcagccttcaatattggttggtggtaccttaaaggactatcaaatcaagggtttacagtggatggtttcgcttttcaataatcatttaaatggtattttagcagacgaaatgggtcttggtaagactatccagacgatatccttacttacatatttatatgaaatgaagaatattcgtgggccatatttagtcattgttcctttatctacactgtcaaattggagcagtgaattcgcgaaatgggctcctaccttaagaactatatcatttaaaggttcgccaaatgagaggaaagccaaacaggctaaaataagggcaggtgaatttgatgtagttctgactacctttgagtatattattaaagaaagagcacttttatccaaggtcaagtgggtccatatgattattgatgaaggccatagaatgaaaaatgcgcaatccaagctttctttaaccttgaacacacattaccatgcagattatagattaattttgacaggtacaccacttcaaaacaacttgccagaattatgggccttattgaattttgtgttacccaagattttcaattccgtgaaatcttttgatgaatggttcaatacaccctttgccaacaccggtgggcaagataaaattgagttgagtgaagaagagacgcttttggttatcaggagattgcataaagtcttgagaccctttttattgcgtcgtttgaaaaaggatgtagaaaaagaattaccggataaagttgagaaggtagtgaagtgcaaaatgagcgctttacaacaaattatgtaccaacaaatgttgaaatatcgtcgtctttttatcggtgatcaaaataataagaaaatggtaggtttaagaggtttcaataatcaaatcatgcaactaaagaaaatctgtaatcatccttttgtatttgaagaagttgaggaccaaatcaatccaacaagagaaacgaatgatgatatttggcgtgttgctggtaaatttgaactattagatagaattttgcctaagcttaaggcaactgggcatagagtattaattttttttcaaatgacccaaattatggatattatggaagattttttaaggtacattaatatcaagtacctgaggttagatggtcatacaaaatctgatgaacgtagtgagttgttacgtctatttaacgcccctgattctgaatacttgtgctttatcttatcaactagagcgggtggtttgggtttaaatttacaaactgcagacactgtcattatttttgatactgactggaatcctcatcaagatttgcaagctcaggatagagcgcatagaataggtcagaagaatgaagttagaattctaagattgattactacgaattcagttgaagaagttatcctagagagagcctacaagaagctagatatcgatggtaaagtcattcaagcaggtaaattcgataacaaatctacatcggaggaacaagaagcgttgcttagatctttgctggatgcagaagaggaacgtagaaagaaaagagagtctggtgttgaagaagaagaggagttaaaagactcagaaatcaacgaaattcttgctcgaaatgacgaagaaatggctgttcttacaaggatggatgaagatagatcaaagaaggaggaagaattgggagtaaagagccgtctcttagaaaagagtgaattacctgatatttacagtagagatattggtgccgagctcaaacgtgaagaatcagaatctgctgctgtttacaatggaaggggtgcaagagaacgtaagacggcaacttacaacgataatatgtctgaagaacagtggttaagacaatttgaagttagcgatgatgaaaaaaatgacaagcaggcaagaaaacaacgaacaaagaaggaagataagagcgaggcgattgatgggaatggagaaattaaaggcgaaaacattgacgctgataatgacggtcctagaattaataatatatcggccgaagatcgggcagatacggatttggcaatgaatgacgatgatttcttgtctaaaaagagaaaggcaggaaggccccgtggaagacctaagaaagtgaaacttgaaggatctgaaaattctgaaccaccagcgcttgaatcaagtccagttactggcgataactctcccagtgaggattttatggacattccaaaaccacgtacagcgggaaaaacatctgttaaatcagcaagaacttcaacaaggggccgtggtcgcggtcgtggtcgtggtcgagggcgaggacgtggacgaggaaggccgccaaaagcaagaaatgggcttgattatgtccgcacgcccgctgcggcaacgagtcctattgatattagagagaaagttgctaaacaagctctagacttataccactttgctctcaattatgaaaatgaagctggaaggaaactttctgacattttcctctccaaaccttccaaagcactatatcccgactactatatgattattaagtaccctgtcgcctttgataatattaacacgcatattgaaacgctagcttacaactcccttaaagagacccttcaagactttcatctgatattttccaatgctaggatatacaatactgagggttcagtagtatacgaagactctttagaactggaaaaagtggttacgaagaaatactgtgagataatgggcgataactcacaactcgactttactgaatttgatgaacagtatggcaccagacccctcgtcttgcctcctgttgttacttcaagcgtggctgaatctttcacagatgaagcggactcgagcatgacagaagcgagtgtatag

SEQ ID NO: 340 - protein, 1703 aa, Saccharomyces cerevisiae
MNIPQRQFSNEEVNRCYLRWQHLRNEHGMNAPSVPEFIYLTKVLQFAAKQRQELQMQRQQQGISGSQQNIVPNSSDQAELPNNASSHISASASPHLAPNMQLNGNETFSTSAHQSPIMQTQMPLNSNGGNNMLPQRQSSVGSLNATNFSPTPANNGENAAEKPDNSNHNNLNLNNSELQPQNRSLQEHNIQDSNVMPGSQINSPMPQQAQMQQAQFQAQQAQQAQQAQQAQQAQARLQQGRRLPMTMFTAEQSELLKAQITSLKCLVNRKPIPFEFQAVIQKSINHPPDFKRMLLSLSEFARRRQPTDQNNQSNLNGGNNTQQPGTNSHYNNTNTDNVSGLTRNAPLDSKDENFASVSPAGPSSVHNAKNGTLDKNSQTVSGTPITQTESKKEENETISNVAKTAPNSNKTHTEQNNPPKPQKPVPLNVLQDQYKEGIKVVDIDDPDMMVDSFTMPNISHSNIDYQTLLANSDHAKFTIEPGVLPVGIDTHTATDIYQTLIALNLDTTVNDCLDKLLNDECTESTRENALYDYYALQLLPLQKAVRGHVLQFEWHQNSLLTNTHPNFLSKIRNINVQDALLTNQLYKNHELLKLERKKTEAVARLKSMNKSAINQYNRRQDKKNKRLKFGHRLIATHTNLERDEQKRAEKKAKERLQALKANDEEAYIKLLDQTKDTRITHLLRQTNAFLDSLTRAVKDQQKYTKEMIDSHIKEASEEVDDLSMVPKMKDEEYDDDDDNSNVDYYNVAHRIKEDIKKQPSILVGGTLKDYQIKGLQWMVSLFNNHLNGILADEMGLGKTIQTISLLTYLYEMKNIRGPYLVIVPLSTLSNWSSEFAKWAPTLRTISFKGSPNERKAKQAKIRAGEFDVVLTTFEYIIKERALLSKVKWVHMIIDEGHRMKNAQSKLSLTLNTHYHADYRLILTGTPLQNNLPELWALLNFVLPKIFNSVKSFDEWFNTPFANTGGQDKIELSEEETLLVIRRLHKVLRPFLLRRLKKDVEKELPDKVEKVVKCKMSALQQIMYQQMLKYRRLFIGDQNNKKMVGLRGFNNQIMQLKKICNHPFVFEEVEDQINPTRETNDDIWRVAGKFELLDRILPKLKATGHRVLIFFQMTQIMDIMEDFLRYINIKYLRLDGHTKSDERSELLRLFNAPDSEYLCFILSTRAGGLGLNLQTADTVIIFDTDWNPHQDLQAQDRAHRIGQKNEVRILRLITTNSVEEVILERAYKKLDIDGKVIQAGKFDNKSTSEEQEALLRSLLDAEEERRKKRESGVEEEEELKDSEINEILARNDEEMAVLTRMDEDRSKKEEELGVKSRLLEKSELPDIYSRDIGAELKREESESAAVYNGRGARERKTATYNDNMSEEQWLRQFEVSDDEKNDKQARKQRTKKEDKSEAIDGNGEIKGENIDADNDGPRINNISAEDRADTDLAMNDDDFLSKKRKAGRPRGRPKKVKLEGSENSEPPALESSPVTGDNSPSEDFMDIPKPRTAGKTSVKSARTSTRGRGRGRGRGRGRGRGRGRPPKARNGLDYVRTPAAATSPIDIREKVAKQALDLYHFALNYENEAGRKLSDIFLSKPSKALYPDYYMIIKYPVAFDNINTHIETLAYNSLKETLQDFHLIFSNARIYNTEGSVVYEDSLELEKVVTKKYCEIMGDNSQLDFTEFDEQYGTRPLVLPPVVTSSVAESFTDEADSSMTEASV

SEQ ID NO: 341 - DNA, 723 bp, Saccharomyces cerevisiae
atgtggtcatcactttttggttggacatcaagtaatgccaagaataaagagtcaccaacaaaggccatagtgcggttgagggagcatatcaaccttctatccaaaaagcaatcgcatttacgtactcaaattacaaatcaagagaatgaagctagaatctttttgacgaagggcaataaagtaatggcgaagaatgcacttaaaaagaagaagacaatcgaacaacttttaagtaaggtagaaggcacaatggagtctatggaacagcagctattctctatagaaagtgcaaacttaaatctagagacaatgagggctatgcaggaaggtgctaaggcaatgaaaactattcacagtggccttgacatagataaagtggatgaaactatggacgagataagggagcaagtcgaattaggagatgaaataagcgacgctatatccaggcctttaattactggggcaaacgaggtggatgaagatgagctggacgaggaattggacatgctggctcaagaaaatgctaaccaagaaacgtccaagatcgttaataataatgttaatgcggcgcctatctcagagaacaaagtctcactacctagtgttccaagtaataaaattaaacaaagtgagaactctgtgaaggacggggaagaggaagaggatgaagaagatgaagatgaaaaagcattaagagaactacaagcagaaatggggctttga

SEQ ID NO: 342 - protein, 240 aa, Saccharomyces cerevisiae
MWSSLFGWTSSNAKNKESPTKAIVRLREHINLLSKKQSHLRTQITNQENEARIFLTKGNKVMAKNALKKKKTIEQLLSKVEGTMESMEQQLFSIESANLNLETMRAMQEGAKAMKTIHSGLDIDKVDETMDEIREQVELGDEISDAISRPLITGANEVDEDELDEELDMLAQENANQETSKIVNNNVNAAPISENKVSLPSVPSNKIKQSENSVKDGEEEEDEEDEDEKALRELQAEMGL

SEQ ID NO: 343 - DNA, 702 bp, Saccharomyces cerevisiae
atgaaacagtttggactggcagcctttgacgagttgaaggatggaaagtacaatgacgtaaacaaaaccatacttgaaaagcaatctgtcgaactaagggaccaattaatggtattccaagaacgactggtagaatttgccaagaaacacaatagcgagcttcaagcttcacctgaattccgctcaaaattcatgcatatgtgctcatctattgggattgatcccctatctttatttgatcgagataagcacttatttacagtgaatgatttttattatgaagtatgtcttaaagttatagaaatttgtcggcaaactaaagatatgaatggaggcgtcatttcttttcaagagttggagaaggtgcattttcgtaagctgaatgttggactcgatgatttggaaaaatctatcgacatgctaaagagcctagagtgttttgagatatttcaaattcgcggcaaaaagtttttacgaagtgttccaaatgagttgacatcagatcaaacaaagattttggaaatatgctcaattctgggctactcaagtatctctttattaaaggcaaacttgggatgggaggctgttaggagtaaatctgctcttgatgaaatggtcgctaacggtttattgtggattgattatcaaggtggtgcagaggcgttgtattgggatccctcttggattacgaggcaactgtga

SEQ ID NO: 344 - protein, 233 aa, Saccharomyces cerevisiae
MKQFGLAAFDELKDGKYNDVNKTILEKQSVELRDQLMVFQERLVEFAKKHNSELQASPEFRSKFMHMCSSIGIDPLSLFDRDKHLFTVNDFYYEVCLKVIEICRQTKDMNGGVISFQELEKVHFRKLNVGLDDLEKSIDMLKSLECFEIFQIRGKKFLRSVPNELTSDQTKILEICSILGYSSISLLKANLGWEAVRSKSALDEMVANGLLWIDYQGGAEALYWDPSWITRQL

SEQ ID NO: 345 - DNA, 4506 bp, Saccharomyces cerevisiae
atgagcaatatcaaaagcacgcaagatagctctcataatgctgtcgctagaagctcaagcgcttcttttgcagcttcagaagaatcatttacgggcataacccatgacaaagatgagcagagcgataccccggcggataaactaacaaaaatgctgacaggacctgcaagagacactgcgagccagattagtgccactgtgtctgaaatggcgccagatgtcgtatctaaagtggagtcatttgcagatgcactatcccgtcatacaacgagaagcggtgcctttaatatggattcagatagtgacgatgggttcgatgcccatgccatctttgaaagttttgtaagagacgctgatgagcaaggcatccatatccgcaaggctggtgttaccatagaggacgtaagcgctaaaggtgtggatgcgagtgccctagaaggtgctacctttggtaacattctttgtttaccgttgaccatctttaaaggtattaaggctaagaggcatcaaaagatgagacagatcataagcaatgtcaatgccctggcagaagcgggtgaaatgattttggttcttggaaggcctggtgctggttgttcctcctttttaaaagtaacagctggtgaaatagatcagtttgccggtggtgtttccggtgaagtagcatatgatggtattccccaagaagaaatgatgaaacgatataaagcagatgttatttacaatggtgagttggatgttcatttcccttatttaacagttaagcaaactttggatttcgctattgcctgcaaaacgcctgctctcagagtcaataacgtttccaaaaaggaatacattgcatccagaagagatttatatgcaaccattttcggtctaaggcatacctataataccaaagttggtaacgatttcgttagaggtgtatctggtggtgaacgtaagcgtgtttccattgccgaggctttggcagccaaaggttccatttactgttgggataatgccactagaggtttggatgcgtctacggccttagaatacgcaaaagccatccgtattatgacaaacttattgaaatcaaccgcttttgttacaatttatcaggcaagtgaaaacatttacgaaacatttgataaagtcactgtcctttattctggtaagcaaatttattttggtttgatccacgaggcaaaaccttatttcgcaaaaatgggttatttgtgtcctccaaggcaagcaacagctgaatttttaaccgcgttgactgatccaaatggattccatctgatcaagccaggttatgaaaataaagtaccaagaaccgctgaggaattcgaaacatattggttaaattctccagagtttgctcaaatgaaaaaagatatcgctgcttataaagagaaggtcaataccgaaaagactaaagaagtttatgacgaatcgatggctcaagagaaatccaaatatacgagaaagaagtcttattatacagtgtcatattgggaacaagttaaactgtgtacccaacgtgggttccaaagaatttacggtaacaagagttatacagtcatcaatgtctgctctgcaataattcaatcttttattactggatcattattttacaataccccttcatccacttccggtgctttttcaagaggtggtgtgttgtattttgcgctactatattattctttgatgggactggcgaatatttcttttgaacataggccaatcttacaaaagcacaagggctattctttgtatcatccttcagctgaggcaattggctccactctggcatctttccccttcagaatgattggtttgacctgtttctttatcattttattcttcctatctgggttgcacagaacagcgggatcattttttaccatctatttgttcttaaccatgtgttcagaggcgatcaatggtttatttgagatggtttcttcagtatgtgacactctttctcaagctaactctatctcgggtattctgatgatgtctatctcaatgtactctacctatatgatccaattgccttcgatgcatccatggtttaaatggatatcgtacgtactacctatcaggtacgccttcgagtcgatgttaaatgccgaatttcacggtaggcatatggattgtgctaacactctagtacccagtggaggagactatgataatttatccgatgactacaaagtatgtgcttttgttggttcgaaaccaggtcagtcttatgtgcttggtgatgactaccttaaaaatcaatttcagtacgtttataagcacacgtggagaaactttggtatcttgtggtgctttttactgggttatgttgttttgaaagtgatattcacagaatataagaggcctgtgaaaggtggtggtgatgctcttatcttcaagaaaggatcaaaaagatttatcgcacatgcagatgaagaatctccagacaatgtcaatgatatagatgccaaagagcaattctccagtgaaagtagcggcgcaaatgatgaagtatttgatgatttagaagccaaaggtgttttcatttggaaggacgtatgctttactattccatatgaaggcggtaagagaatgcttttggataatgtttcaggttattgtattccaggtaccatgacggccttgatgggagagtcaggtgctggtaaaacaactttgttaaatactcttgctcaaagaaatgtcggtatcattactggtgatatgcttgtcaatggacgtcccattgatgcgagtttcgaaaggcgtacaggttatgtacaacaacaggatatacatatcgcagagttaactgttagggaatcgttgcagttttctgctcgtatgcgtcgccctcagcatttgcctgattctgaaaaaatggattatgtggaaaaaatcatcagagttttgggaatggaagagtatgcggaagcccttgttggtgaggttggttgtggtttaaacgttgaacagagaaagaagctgtctattggtgttgaactagtcgccaaaccagacttattattattcctcgatgaacctacatcaggtttggattctcaatcttcatgggccattattcaattattaagaaagttatcaaaagctggccaatccattctttgtacgatccatcaaccttcagctactctgttcgaagagtttgatagattactacttttgaggaagggtggacaaactgtttatttcggagatattggtaagaactctgccaccattttgaactactttgaaaggaatggggcaagaaaatgtgattctagtgaaaatcctgctgaatatattttagaggctattggtgccggtgccacagcatccgtcaaagaagactggcacgaaaaatggttgaactctgtcgagtttgaacaaacaaaagaaaaagtacaggatttaataaatgatttatcgaaacaagaaactaaatccgaagttggagacaaaccttccaaatatgctacttcttatgcttaccagttcagatatgttttaatcagaacctctacttcattttggagaagtctgaattacatcatgtcaaagatgatgctaatgctggttggtggtctgtatattggtttcacatttttcaatgttggtaaaagttatgtcggcttacaaaatgcgatgttcgcggcatttatctctattatcttgtctgctcctgcaatgaaccaaatccaaggacgtgctattgcctccagagaactttttgaagttagggaatcccaatctaacatgtttcactggtcgctggtgttgatcactcagtacttgagcgaacttccctatcatttatttttttcgacaattttctttgtctcatcgtattttccattaagaatcttcttcgaagcgtcaagatctgcggtgtactttttgaattactgcattatgttccagttatactatgttggtcttggcttaatgatcctatatatgtcaccgaaccttccatccgctaatgttatcttaggtttgtgtctgtcatttatgctttctttctgtggtgttacacaacctgtctcattgatgcctggcttctggacattcatgtggaaggcttccccatacacatattttgttcagaatctggtcggaattatgctgcacaaaaaaccagtcgtatgcaaaaagaaagaactaaactacttcaacccaccaaacggctcaacgtgtggagagtacatgaaaccctttttggaaaaagctactggttacatcgaaaatcctgatgctacgtcagattgtgcatactgtatttacgaagttggagataattatttgacacatatcagctctaagtatagctacttgtggagaaattttggaatattttggatttacattttcttcaatatcattgctatggtttgtgtgtattacctcttccatgtaagacaatcttccttcctaagccccgtatctatactcaataaaattaaaaacataaggaaaaagaagcagtaa

SEQ ID NO: 346 - protein, 1501 aa, Saccharomyces cerevisiae
MSNIKSTQDSSHNAVARSSSASFAASEESFTGITHDKDEQSDTPADKLTKMLTGPARDTASQISATVSEMAPDVVSKVESFADALSRHTTRSGAFNMDSDSDDGFDAHAIFESFVRDADEQGIHIRKAGVTIEDVSAKGVDASALEGATFGNILCLPLTIFKGIKAKRHQKMRQIISNVNALAEAGEMILVLGRPGAGCSSFLKVTAGEIDQFAGGVSGEVAYDGIPQEEMMKRYKADVIYNGELDVHFPYLTVKQTLDFAIACKTPALRVNNVSKKEYIASRRDLYATIFGLRHTYNTKVGNDFVRGVSGGERKRVSIAEALAAKGSIYCWDNATRGLDASTALEYAKAIRIMTNLLKSTAFVTIYQASENIYETFDKVTVLYSGKQIYFGLIHEAKPYFAKMGYLCPPRQATAEFLTALTDPNGFHLIKPGYENKVPRTAEEFETYWLNSPEFAQMKKDIAAYKEKVNTEKTKEVYDESMAQEKSKYTRKKSYYTVSYWEQVKLCTQRGFQRIYGNKSYTVINVCSAIIQSFITGSLFYNTPSSTSGAFSRGGVLYFALLYYSLMGLANISFEHRPILQKHKGYSLYHPSAEAIGSTLASFPFRMIGLTCFFIILFFLSGLHRTAGSFFTIYLFLTMCSEAINGLFEMVSSVCDTLSQANSISGILMMSISMYSTYMIQLPSMHPWFKWISYVLPIRYAFESMLNAEFHGRHMDCANTLVPSGGDYDNLSDDYKVCAFVGSKPGQSYVLGDDYLKNQFQYVYKHTWRNFGILWCFLLGYVVLKVIFTEYKRPVKGGGDALIFKKGSKRFIAHADEESPDNVNDIDAKEQFSSESSGANDEVFDDLEAKGVFIWKDVCFTIPYEGGKRMLLDNVSGYCIPGTMTALMGESGAGKTTLLNTLAQRNVGIITGDMLVNGRPIDASFERRTGYVQQQDIHIAELTVRESLQFSARMRRPQHLPDSEKMDYVEKIIRVLGMEEYAEALVGEVGCGLNVEQRKKLSIGVELVAKPDLLLFLDEPTSGLDSQSSWAIIQLLRKLSKAGQSILCTIHQPSATLFEEFDRLLLLRKGGQTVYFGDIGKNSATILNYFERNGARKCDSSENPAEYILEAIGAGATASVKEDWHEKWLNSVEFEQTKEKVQDLINDLSKQETKSEVGDKPSKYATSYAYQFRYVLIRTSTSFWRSLNYIMSKMMLMLVGGLYIGFTFFNVGKSYVGLQNAMFAAFISIILSAPAMNQIQGRAIASRELFEVRESQSNMFHWSLVLITQYLSELPYHLFFSTIFFVSSYFPLRIFFEASRSAVYFLNYCIMFQLYYVGLGLMILYMSPNLPSANVILGLCLSFMLSFCGVTQPVSLMPGFWTFMWKASPYTYFVQNLVGIMLHKKPVVCKKKELNYFNPPNGSTCGEYMKPFLEKATGYIENPDATSDCAYCIYEVGDNYLTHISSKYSYLWRNFGIFWIYIFFNIIAMVCVYYLFHVRQSSFLSPVSILNKIKNIRKKKQ

SEQ ID NO: 347 - DNA, 2358 bp, Saccharomyces cerevisiae
atgcccatcggtaacccaatcaatacgaatgatatcaagtccaaccgcatgcgccaggaatcaaatatgagtgccgtgagcaatagcgaaagtactattggccagtccacccaacagcagcagcaacaacaacaatatctcggccagagcgttcaacctctgatgcccgtatcctaccaatacgtagttcctgaacagtggccgtacccgcaatattatcagcagccgcaatcccagtctcaacagcaactgcaatcccagcctcagatgtatcaagttcaagaatcctttcagagtagcggttctgactcaaatgcttccaatccaccttccacgtctgtaggtgttccttccaacgctactgcaactgcgttaccgaatggttctgcaatcaccaccaaaaaaagcaataacagtactaatatcagtaacaatgtaccatactactattattttccccaaatgcaagcccaacaatcaatggcatattcgtatccacaagcgtattattattatcctgcaaacggcgatggaaccactaacggtgcaacaccatctgtaaccagtaatcaagtccaaaaccccaatttggaaaaaacctactcaacctttgaacaacagcaacaacaccagcagcaacaacaattacaagctcaaacgtatccggcccaaccaccaaagataggtaatgcattttcaaagttcagtaaatctggaccaccttctgattcgtccagtggctctatgtctcccaattctaatcgcactagtcgcaatagtaatagtatctcgtccttagctcagcagcctccaatgtcaaactatccacaaccttccacctaccaataccccggttttcacaagacttcgtcaattccaaactcgcattctccaattcctccaagatcattaacaacgccaactcaaggtccaaccagccaaaatggacctttaagctacaatcttccgcaagtgggtttgctaccgcctcagcaacaacaacaggtgagcccgttgtatgatggaaattctataactccaccagttaaaccctctactgatcaagaaacttatttaactgcaaataggcacggagtgtcagatcaacagtatgactcaatggctaaaaccatgaattctttccaaacaactaccataaggcacccgatgcccttaatcgccactaccaatgccacaggcagtaacaccagcggcacttcggcaagtataataaggccaagagtaacaacaacaatgtgggaggatgaaaaaacgctatgttatcaggtagaagctaacggtatttcagtggtaagaagagcagataatgatatggttaatggtaccaaacttctgaatgtaactaagatgacaagaggtagaagagatggtattctaaaagcggaaaaaatcaggcatgtggtgaagattggttccatgcatttgaagggtgtctggataccgtttgagcgtgccctagcaatagcacaaagagaaaaaattgctgactatctttatcccttgttcatcagggatattcagagcgtattgaaacaaaataatccaagcaatgatagcagtagtagtagcagtagcactggtattaaatccatcagtccgcgtacctattatcaacctattaacaactatcaaaatcctaatggtccttcaaatatatctgctgctcagctgacatactcctcaatgaatttgaacaacaaaattatacccaataattctataccagctgtaagtacaatcgctgcgggtgaaaagcccttgaaaaaatgcacaatgcctaactctaaccaactagaaggacatactataactaacctacagaccctttcggcaacaatgccgatgaaacaacaactgatgggcaacatagcttcacccttatcgtatccacgcaacgccacaatgaattcggcaagtacattaggcattacacctgcagattcaaagcctttgacaccttctccaactacaacaaacacaaatcaatcatctgaatcaaatgtgggaagtatccatacaggaatcacccttccaagagtggaatctgaatcggcatcacattccaaatggtctaaggaagcagacagtgggaatactgtaccagataatcaaacattaaaggagccacgatctagtcaattaccaatctccgcattgacttcgacggatactgacaaaataaaaacaagtacaagcgatgaagcaacacaaccgaacgaacctagtgaagcagaacctgtcaaggagtcagagtcatccaaatcacaagttgatggagctggcgatgtctccaacgaagaaattgctgctgatgatacaaaaaaacaagaaaaatag

SEQ ID NO: 348 - protein, 785 aa, Saccharomyces cerevisiae
MPIGNPINTNDIKSNRMRQESNMSAVSNSESTIGQSTQQQQQQQQYLGQSVQPLMPVSYQYVVPEQWPYPQYYQQPQSQSQQQLQSQPQMYQVQESFQSSGSDSNASNPPSTSVGVPSNATATALPNGSAITTKKSNNSTNISNNVPYYYYFPQMQAQQSMAYSYPQAYYYYPANGDGTTNGATPSVTSNQVQNPNLEKTYSTFEQQQQHQQQQQLQAQTYPAQPPKIGNAFSKFSKSGPPSDSSSGSMSPNSNRTSRNSNSISSLAQQPPMSNYPQPSTYQYPGFHKTSSIPNSHSPIPPRSLTTPTQGPTSQNGPLSYNLPQVGLLPPQQQQQVSPLYDGNSITPPVKPSTDQETYLTANRHGVSDQQYDSMAKTMNSFQTTTIRHPMPLIATTNATGSNTSGTSASIIRPRVTTTMWEDEKTLCYQVEANGISVVRRADNDMVNGTKLLNVTKMTRGRRDGILKAEKIRHVVKIGSMHLKGVWIPFERALAIAQREKIADYLYPLFIRDIQSVLKQNNPSNDSSSSSSSTGIKSISPRTYYQPINNYQNPNGPSNISAAQLTYSSMNLNNKIIPNNSIPAVSTIAAGEKPLKKCTMPNSNQLEGHTITNLQTLSATMPMKQQLMGNIASPLSYPRNATMNSASTLGITPADSKPLTPSPTTTNTNQSSESNVGSIHTGITLPRVESESASHSKWSKEADSGNTVPDNQTLKEPRSSQLPISALTSTDTDKIKTSTSDEATQPNEPSEAEPVKESESSKSQVDGAGDVSNEEIAADDTKKQEK

SEQ ID NO: 349 - DNA, 1668 bp, Saccharomyces cerevisiae
atgtataatggcaaggatagagcacaaaactcctatcagccaatgtaccaaaggcctatgcaggtacaaggacaacagcaagctcaatcgttcgttggaaagaaaaacacaatcggaagtgtgcatggaaaagccccgatgctaatggccaataatgatgtttttactattggaccttatagggcaagaaaagatagaatgcgggtatctgtcttagaaaagtacgaagttattggctacattgctgcgggcacatatggtaaagtttacaaagcgaaaagacaaatcaactccggtaccaattccgctaatggttctagtctgaatggtaccaatgcgaaaattccgcagtttgacagcacgcaaccaaaatcaagctcttcaatggacatgcaggcaaatacaaacgcattaagaagaaacttgttaaaggatgaaggagtgacccccggaagaatacgaactacgagggaagatgtatccccgcactataattcccaaaaacaaaccctcattaaaaaaccgctgacggtattttatgccattaaaaagttcaagacagagaaggatggcgtcgaacaattgcattatacgggaatatctcagagtgcctgtagagaaatggcattatgtcgagaattgcacaacaagcatttaaccacattagtggaaatttttttggaaaggaaatgtgtccatatggtatacgaatatgcggagcatgatctgctacaaattatccacttccattcccatcccgaaaaaaggatgataccaccaagaatggttcggtctattatgtggcagcttttagacggcgtatcgtatcttcatcaaaattgggtgcttcatcgagatttgaaacccgcaaatataatggtgaccatagatggatgtgttaaaattggtgatttaggtttggccagaaaatttcataatatgctgcaaaccctctatactggggataaagtggttgtcactatatggtaccgtgcacctgagttgctattgggagcacggcactatacccctgcggttgatttatggtccgttggctgcatttttgcagaactgataggattacagcccatatttaaaggtgaagaagctaaactagactctaaaaagactgttccatttcaagtgaatcaactacagagaattttggaagttcttggcactcccgatcaaaaaatttggccttatttggagaagtatccagaatatgatcaaattacgaagtttccaaagtatagggataaccttgctacatggtatcattccgcgggaggaagggacaagcatgctttaagcttactttaccacttgttaaattatgatccaattaaaagaatagatgcatttaatgcgttggaacataagtacttcacagaaagtgatattcctgttagtgaaaatgtatttgaaggtctaacttacaaatacccggcaagaagaattcacacgaacgataatgacatcatgaatcttggatcaagaacgaaaaacaatacacaagcttcaggaatcaccgcaggtgccgctgcaaatgcgttaggtgggcttggtgttaaccgtagaattctggccgcggcagcagcagccgctgctgcggtgtcaggaaacaatgcatcagatgagccatctcgaaagaaaaacagaagatag

SEQ ID NO: 350 - protein, 555 aa, Saccharomyces cerevisiae
MYNGKDRAQNSYQPMYQRPMQVQGQQQAQSFVGKKNTIGSVHGKAPMLMANNDVFTIGPYRARKDRMRVSVLEKYEVIGYIAAGTYGKVYKAKRQINSGTNSANGSSLNGTNAKIPQFDSTQPKSSSSMDMQANTNALRRNLLKDEGVTPGRIRTTREDVSPHYNSQKQTLIKKPLTVFYAIKKFKTEKDGVEQLHYTGISQSACREMALCRELHNKHLTTLVEIFLERKCVHMVYEYAEHDLLQIIHFHSHPEKRMIPPRMVRSIMWQLLDGVSYLHQNWVLHRDLKPANIMVTIDGCVKIGDLGLARKFHNMLQTLYTGDKVVVTIWYRAPELLLGARHYTPAVDLWSVGCIFAELIGLQPIFKGEEAKLDSKKTVPFQVNQLQRILEVLGTPDQKIWPYLEKYPEYDQITKFPKYRDNLATWYHSAGGRDKHALSLLYHLLNYDPIKRIDAFNALEHKYFTESDIPVSENVFEGLTYKYPARRIHTNDNDIMNLGSRTKNNTQASGITAGAAANALGGLGVNRRILAAAAAAAAAVSGNNASDEPSRKKNRR

SEQ ID NO: 351 - DNA, 972 bp, Saccharomyces cerevisiae
atgtcggggagcttctggacatctacacaaaggcatcattggcaatataccaaggcatcattggctaaagagaggcagaagttatggctattggagtgccagctgtttcctcaaggtttgaatattgtaatggattcgaagcaaaacggcatcgaacaatccatcacaaagaatataccaataactcaccgagacttacactatgataaagattataatctaaggatctactgctatttcctgataatgaagcttggaaggagactaaatataagacagtatgcactggctacagcacatatttatctatcaaggtttttaataaaggcttcagttagagaaataaacctatatatgctggttactacgtgtgtatatttagcatgcaaagttgaagaatgcccgcaatatatcagaactttggtaagtgaagcccgtaccttatggcccgaatttattcctcctgaccctactaaagttactgagtttgagttctacttactagaagaattggaaagttacttaattgtccaccacccttatcaatccttaaagcaaattgttcaagtcttaaagcaaccgccatttcaaataacactatcgtcagatgatctacaaaactgttggtccttaatcaacgacagttatataaatgatgttcatttgctttaccctcctcatattatcgctgttgcatgtttattcattacgatttccattcatgggaaaccaaccaaaggatcatcgttagcatctgcggcttctgaagccatcagagatcctaaaaattctagttctcctgttcaaatagcttttaatcgttttatggcagaatctcttgtagatcttgaggaggttatggatacgattcaagagcaaattacattatacgatcattgggacaagtaccacgaacaatggataaagtttctgctacatactttgtatcttagaccagcatctgcaatttaa

SEQ ID NO: 352 - protein, 323 aa, Saccharomyces cerevisiae
MSGSFWTSTQRHHWQYTKASLAKERQKLWLLECQLFPQGLNIVMDSKQNGIEQSITKNIPITHRDLHYDKDYNLRIYCYFLIMKLGRRLNIRQYALATAHIYLSRFLIKASVREINLYMLVTTCVYLACKVEECPQYIRTLVSEARTLWPEFIPPDPTKVTEFEFYLLEELESYLIVHHPYQSLKQIVQVLKQPPFQITLSSDDLQNCWSLINDSYINDVHLLYPPHIIAVACLFITISIHGKPTKGSSLASAASEAIRDPKNSSSPVQIAFNRFMAESLVDLEEVMDTIQEQITLYDHWDKYHEQWIKFLLHTLYLRPASAI

SEQ ID NO: 353 - DNA, 4284 bp, Saccharomyces cerevisiae
atgaataacggttctggtcgatacttgctgactcccccagatgatcttcacccctatgtgccaagctcgaaacctcaggaacaagtataccctgatttcaagccttgggagcacactgcagcagaagatcaaatcctagcaaactttgtggctaagggcttttaccatacaccaatggtaaatttcgagtccatatctgcgagatcatctgttcatgaatcattagtcactcaatccaacattctttcccagcaattcgacaaaattatcaagattagagaagaccacattaataagatcccctcaaattccacgacgacattacacgggcctggttttcagttgcctaatagaataacccttactgatcatagaaaggaaacgtggttgcatgaattgagttcgtctcacacttcgctggtcaaaattggcaagtttatacctcacggcttgaaaagaaggcaagtcatcgagcagtgctatttaaaatttataccattgaaaagggcgatttggttgataaagtgctgctattttatcgaatggaaatcgaaccacaaaaagaagaggtcaaatgctgctggggcagatgatgccatttccatgcacctgctaaaggactggacggatacctttgtatacatcctggaaaagctcatctttgatatgacaaatcactataacgattctcaacaactgcgtacgtggaagaggcagatttcttattttttaaaacttttggggaattgctactcactaagattgatcaataaggaaatctttcatcattggcttgtagagtttataaataagatggaaaacttcgaatttttgccattatctttacatattttgatgattttttggaacgacatctgccaaattgatacaaatgctcctgttgcggctacaataacatcaagtcaaaaagagcccttctttctggtaacaaaaatcactgatatgctattgcacaaatattatattgtttccagcagcaaatcaatgataaatgacgagaactacatcatcaatgatataaagaaaaacaacaagataaagttgaatattctcaaaatattatccagtttaattttgaaaatttttcaagaacaatctttagaggtgtttatatttcccacatctaactgggaaatttacaagcccttactttttgaaatagtctcaaacgccgacactaatcaaaattctgatatgaagaaaaaattagagttaattagttacagaaacgagtcattgaagaataattcttctatacgaaacgtaataatgtctgccagcaacgcaaatgactttcaattaactatcgtcacctgtaaacaatttccaaaactatcatgcattcaattaaattgtatagatactcagttcaccaagctactggacgataaccctacagaattcgattggcccacttacgttgaccaaaatccccttacaatgcataaaattattcaattaattctctggtccatacatccatcaaggcaatttgatcactatgaatctaatcaactggtagcgaaattattactattgcgaataaattcaacagatgaggatttgcacgaattccagatagaagatgccatttggtcattggttttccaattagccaaaaatttttcggcccaaaagagggtggtatcatatatgatgccttctttgtatcgcctgcttaatatactaattacttatggcatcattaaggtccctacgtatatcagaaagctaatcagttccggcctactttatctccaagattccaatgataagtttgtgcatgtccagctgttaattaacttgaaaatttcaccgttgatgaaaagtcaatacaatatggtattgaggaacgttatggaatatgacgttaaattttatgaaatttttaatttcgaccaactcgtggaaatcacagaacaaatcaaaatgcgaatactctccaatgatataactaatttgcaactgtcgaaaactcctctgagcattaaaatcatggttgcagaatggtacttatcacatttatgttccggtattttatctagtgttaaccgcacagtgttgctaaaaatattcaagattttttgtatcgatctggaggttttccaccacttttttaagtggatcgagtttattgtctaccatcaattgctaagtgatatagaatctctggaggcattgatggacatcttgctatgctaccaaaaattgttctcacaattcattaatgaccatattctttttacgaagacgttcatattcatttacaagaaagttttgaaagaaaaagacgtgcctgcttataatgtgacttcatttatgccattctggaaattttttatgaaaaacttcccttttgttttaaaggtggataacgatttaaggattgagttacaatctgtttacaatgatgagaaattgaaaactgagaagctgaagaatgataaatcagaagtcttgaaggtgtattccatgatcaataattcaaaccaagctgttggacagacttggaattttcccgaggtgtttcaagtaaacatcaggtttctactacacaactccgagatcattgatacaaatacaagcaaacagttccagaaagcacgaaacaatgtcatgcttttgattgccactaacttgaaggagtacaataaatttatgtccattttcttgaaaaggaaagactttactaacaaaaatttaattcaattgatctctctaaaacttctaacttttgaagtgacgcagaatgtgttggggctcgagtatattattcgattattaccaataaacttggaaaataatgacggctcatatggtctgtttttgaagtatcataaagaacaattcataaagtcaaattttgagaaaattttacttacatgttatgaattagaaaaaaaatatcatggcaacgaatgtgaaataaattattatgagatcctattgaaaattttaataacttatgggtcatctcccaaattacttgcaacatctacaaaaatcattatgttgttattgaatgatagcgtggaaaactcatctaatattttggaggatattttgtactactcaacttgtccgtcggaaaccgatcttaacgatattccattgggtagtggacaaccagacaatgacactgttgtaaccaacgatgataaaagtgacgatgatgatcacacagtcgacgaaattgatcatgtagaatattacgttatgatggactttgccaatctttgggttttccaagcgtttacctgtttctgcatcaaaaaaatcatggagaataatgagccagcaatggcaatggaagacttgaagaacttcatattccaaattatcgaaataactaattctaatgatttatgttcacaaatatttgaccaactgaaggatatgcagaccattgagatgataacccaaatagtggagaaagatttctgcacttcttgtttgcaaaacaacaaccaaaagatagatgataattacatcgttgtggtgatcgagattataacgtcattatcgatgaggtttcaaagagaaacttctggtatgatagttatttccatggagaactatcatttactaataaagatcataagacaattaagtgaactgaacgaaggaaatttatctaagagagaaatccaaatagatgccgtcttgaaaatttttagctttcatcaggattccattttccaacgcatcatcgctgatttatcagctgataaacccacaagtccattcattgatagcatatgcaagctgtttgataaaatatcatttaatttaagattgaagctgttcttgtacgaaattttgtcttcattgaaatcattcgccatctattcatccacaattgatgccccagcattccacacaagcggtaaggtcgaactaccgaagaaattgctgaacttaccaccattccaagtgtcctctttcgttaaggaaacaaaacttcatagtggcgactacggggaagaagaagatgcagaccaagaagaatcgtttagtttaaatttaggaatcggcatagttgaaatagcgcacgaaaacgaacagaaatggctcatttatgacaagaaagatcataaatatgtctgcacattttccatggagccgtaccacttcatctccaactataataccaagtacacagatgacatggctacaggcagtaatgatacgactgcgtttaacgattcctgtgtaaacctgagtctttttgatgctcggtttgagaggaaaaatccacattga

SEQ ID NO: 354 - protein, 1427 aa, Saccharomyces cerevisiae
MNNGSGRYLLTPPDDLHPYVPSSKPQEQVYPDFKPWEHTAAEDQILANFVAKGFYHTPMVNFESISARSSVHESLVTQSNILSQQFDKIIKIREDHINKIPSNSTTTLHGPGFQLPNRITLTDHRKETWLHELSSSHTSLVKIGKFIPHGLKRRQVIEQCYLKFIPLKRAIWLIKCCYFIEWKSNHKKKRSNAAGADDAISMHLLKDWTDTFVYILEKLIFDMTNHYNDSQQLRTWKRQISYFLKLLGNCYSLRLINKEIFHHWLVEFINKMENFEFLPLSLHILMIFWNDICQIDTNAPVAATITSSQKEPFFLVTKITDMLLHKYYIVSSSKSMINDENYIINDIKKNNKIKLNILKILSSLILKIFQEQSLEVFIFPTSNWEIYKPLLFEIVSNADTNQNSDMKKKLELISYRNESLKNNSSIRNVIMSASNANDFQLTIVTCKQFPKLSCIQLNCIDTQFTKLLDDNPTEFDWPTYVDQNPLTMHKIIQLILWSIHPSRQFDHYESNQLVAKLLLLRINSTDEDLHEFQIEDAIWSLVFQLAKNFSAQKRVVSYMMPSLYRLLNILITYGIIKVPTYIRKLISSGLLYLQDSNDKFVHVQLLINLKISPLMKSQYNMVLRNVMEYDVKFYEIFNFDQLVEITEQIKMRILSNDITNLQLSKTPLSIKIMVAEWYLSHLCSGILSSVNRTVLLKIFKIFCIDLEVFHHFFKWIEFIVYHQLLSDIESLEALMDILLCYQKLFSQFINDHILFTKTFIFIYKKVLKEKDVPAYNVTSFMPFWKFFMKNFPFVLKVDNDLRIELQSVYNDEKLKTEKLKNDKSEVLKVYSMINNSNQAVGQTWNFPEVFQVNIRFLLHNSEIIDTNTSKQFQKARNNVMLLIATNLKEYNKFMSIFLKRKDFTNKNLIQLISLKLLTFEVTQNVLGLEYIIRLLPINLENNDGSYGLFLKYHKEQFIKSNFEKILLTCYELEKKYHGNECEINYYEILLKILITYGSSPKLLATSTKIIMLLLNDSVENSSNILEDILYYSTCPSETDLNDIPLGSGQPDNDTVVTNDDKSDDDDHTVDEIDHVEYYVMMDFANLWVFQAFTCFCIKKIMENNEPAMAMEDLKNFIFQIIEITNSNDLCSQIFDQLKDMQTIEMITQIVEKDFCTSCLQNNNQKIDDNYIVVVIEIITSLSMRFQRETSGMIVISMENYHLLIKIIRQLSELNEGNLSKREIQIDAVLKIFSFHQDSIFQRIIADLSADKPTSPFIDSICKLFDKISFNLRLKLFLYEILSSLKSFAIYSSTIDAPAFHTSGKVELPKKLLNLPPFQVSSFVKETKLHSGDYGEEEDADQEESFSLNLGIGIVEIAHENEQKWLIYDKKDHKYVCTFSMEPYHFISNYNTKYTDDMATGSNDTTAFNDSCVNLSLFDARFERKNPH

SEQ ID NO: 355 - DNA, 4263 bp, Saccharomyces cerevisiae
atgagttctgacgcttccacgtacagacttgaggatgttttatccagcttctatagagtggagaaaatcaaaaagatcaactatcatcagtacatttctaaagcccaaaacgatcaatggtctatccaaatggaattcatgctacggaagcaggatccaaagactctagttgcgctgctttcaagggatttatggtgtttcagtataaatgatgatccggtaccgacacctcctgcgatagaacataaaccagtgagcccagataaaatcggaactttcactgccgattattcaaagccaaacttaccgccacactatgctctttttttaaaagctttaagaaggaaaatttacattaatttggcattaggttcacacaataagctaatacaatttgggaatgcctgcatatcattaagcggagtgccaaattatctcgtacagctagaaccacacctttttgtaaacggagatctcacagtgtcgttatgtgccaagaacatgggattagtaccaatgaaggaggaaaatttggaagaatctttcctttcaaagcatgcgctttatttagcaccatctggaataaggatgcatttggcccctgcttccaagcaaggatacttgataacgccaccaaaacatacagaacttctcttgacgacgttaagtgtatctcatggtataaacttacaaaataaaaaaaatttgaaatgggttgctgttgttcctgacttaggacatctcaacggccacacacctactatagcttcgtatttaactcccttacttgaagcaaagaagctagtatggccgctgcatttaatcttcgcccaaccagtagctgatatagaaaattctacttccggagatccatcagaatttcactgtttgcaagatgctctggatgccattgatgatttcatacaattaaagcaaacagctgcctataggactccaggaagttccggcgtattgagcagtaatattgctggtacaaatcccttaagctcagatggagcatatacagaacagtttcaacattataagaacaactcaattagttctcaacccgcttcttatcattctgtccaagaaactaataagatatctccgaaagatttctcccctaatttcacaggcattgataaattaatgctgtcgcccagcgatcaatttgctccagctttcttaaatacccctaataataacatcaatgagaatgaattatttaatgataggaaacaaactacagtatcaaatgacttagagaacagcccactgaaaacggaactggaggcaaatggtagatcactcgaaaaggtaaataattccgtgagcaagacaggaagcgtagacacacttcataataaagagggaacactggaacaacgagaacagaacgaaaatctgccaagtgataaaagtgactctatggtagacaaggaattgtttggtgaggatgaggatgaggatttatttggcgatagcaataaatcgaattctacaaacgaatcgaacaaaagtatatcggacgaaattaccgaggatatgttcgaaatgtctgatgaagaagaaaataataacaataaaagcattaataaaaataacaaggaaatgcatactgatcttggtaaagatattccattttttccctcatctgaaaaaccgaatatccgtacgatgagcggaactacaaaaagattaaatggaaagaggaaatatttggatattccgatagatgaaatgaccttgccaacgagtccattatatatggacccaggtgcgccactccctgtggaaacaccccgcgatagacgcaaaagtgtgttcgctccactgaattttaaccccataatagaaaacaatgttgataacaaatacaaatctggagggaaattttccttcagtccgttgcaaaaggaggaagcattaaactttgatatttctatggcggatctttctagctctgaagaggaagaggatgaagaagagaacggtagcagcgatgaggatctaaagtcattgaacgtacgcgacgacatgaaaccttctgataacatcagtactaatactaatattcatgagcctcaatacataaattactcttcgatcccaagtctacaagactctattataaagcaagaaaatttcaattcagtaaacgatgctaatatcactagcaataaggaaggcttcaactctatttggaaaattcctcaaaatgatataccacagaccgagtcaccactgaagaccgttgattcatctattcaacccatagaatccaatataaagatgaccttggaagataataatgttaccagtaatccgtccgaatttacgccgaatatggtaaattctgaaatttctaacctaccaaaagacaagagtggtatccccgaattcacaccggcggaccccaatttatcttttgaatcatcaagtagtctaccgtttctattgagacacatgccgctagcatctataccggacattttcatcacgcctactcccgttgttacaatttcagaaaaagaacaagacatcttagatttaattgcagaacaagtcgtcactgattataatatcttaggaaacctcggtattccaaagatcgcctataggggagttaaagattgccaagaaggtttaataacaaccacaatgttacagttattttccactttcgatagattaaatggcaatgatacgatctccaaattctataacatgaagcagccgtacgtttttgtaaagaaacatcacgaactaatcaaagtcaaacacgactctcagccatttattaagttcctcaattttcgccctccaaatggaataaaaaacttcaaatccttattattaagttcatctttcaaagaagattgtctgtcatttgcgccaactctatctcaaacatatattaatcaagagttagggttttgtgagttgcttaaactaactaatgaagacccgcccggactgatgtacttgaaggcatttgataaaaacaagttactgttgttagctgcgcagattgtttcatactgttctaataataagaactccatcaaaaacgtgccaccaatattaataattttacccttggataatgcaactctgactgaattagtagacaaggcgaatatttttcaggtgatcaagaacgaagtttgtgccaagatgcctaacattgaactatatttgaaagttattcctatggatttcattagaaacgtactggtgacagtggatcagtacgtcaacgtagcaatttctatatataacatgctgccgccaaaatctgtaaagttcacccacattgcgcatacgctgccggagaaagtgaatttcagaaccatgcagcaacagcaaatgcaacagcaacagcaacagcaacagcagcagcagaataacagtacaggatcatcttctataatatattatgactcgtacatccacctggcatactcgcgtagtgtagataaagagtgggtttttgcagctctttcagatagctatggacaaggcagcatgacgaaaacgtggtacgtcgggaattccagaggaaaatttgacgacgcatgtaatcaaatatggaatatcgccctaaatttagcgtctaaaaaattcggaaaaatatgtctaattttaactagattgaatggcatactgccggatgatgaattgatgaattggaggagactttctggtaggaatatacatcttgctgtggtgtgtgtggatgacaactctaaaatctccttcatagatgaggacaaattgtaccctagtttcaagccgatctacaaagacactaggtttggaggacgcatggatatgaccagattatacgactatgaaataagggatatagaccaggacatccatggaatagtatttcagcacccgttcccactggcacactcacagcatcgctgtgctattaggagtggtgctttgatcaaattcaaaaaatgcgacggtgatacggtttgggacaaattcgcagtcaaccttttaaactgtccacattctgatagtacacaattgctggaaaccatcttagaagagtttcgcaacctggctgctctaaacgtgtggtacggtctctctgatggcgaagatggccatattccatggcatatcctagccgtgaaaaaaatgatgaacactcttgtgcacaccagagtaaaaattgctaatacttccgccgctactgtgcataccgctacttcttcatcaattattctctcggataaataa

SEQ ID NO: 356 - protein, 1420 aa, Saccharomyces cerevisiae
MSSDASTYRLEDVLSSFYRVEKIKKINYHQYISKAQNDQWSIQMEFMLRKQDPKTLVALLSRDLWCFSINDDPVPTPPAIEHKPVSPDKIGTFTADYSKPNLPPHYALFLKALRRKIYINLALGSHNKLIQFGNACISLSGVPNYLVQLEPHLFVNGDLTVSLCAKNMGLVPMKEENLEESFLSKHALYLAPSGIRMHLAPASKQGYLITPPKHTELLLTTLSVSHGINLQNKKNLKWVAVVPDLGHLNGHTPTIASYLTPLLEAKKLVWPLHLIFAQPVADIENSTSGDPSEFHCLQDALDAIDDFIQLKQTAAYRTPGSSGVLSSNIAGTNPLSSDGAYTEQFQHYKNNSISSQPASYHSVQETNKISPKDFSPNFTGIDKLMLSPSDQFAPAFLNTPNNNINENELFNDRKQTTVSNDLENSPLKTELEANGRSLEKVNNSVSKTGSVDTLHNKEGTLEQREQNENLPSDKSDSMVDKELFGEDEDEDLFGDSNKSNSTNESNKSISDEITEDMFEMSDEEENNNNKSINKNNKEMHTDLGKDIPFFPSSEKPNIRTMSGTTKRLNGKRKYLDIPIDEMTLPTSPLYMDPGAPLPVETPRDRRKSVFAPLNFNPIIENNVDNKYKSGGKFSFSPLQKEEALNFDISMADLSSSEEEEDEEENGSSDEDLKSLNVRDDMKPSDNISTNTNIHEPQYINYSSIPSLQDSIIKQENFNSVNDANITSNKEGFNSIWKIPQNDIPQTESPLKTVDSSIQPIESNIKMTLEDNNVTSNPSEFTPNMVNSEISNLPKDKSGIPEFTPADPNLSFESSSSLPFLLRHMPLASIPDIFITPTPVVTISEKEQDILDLIAEQVVTDYNILGNLGIPKIAYRGVKDCQEGLITTTMLQLFSTFDRLNGNDTISKFYNMKQPYVFVKKHHELIKVKHDSQPFIKFLNFRPPNGIKNFKSLLLSSSFKEDCLSFAPTLSQTYINQELGFCELLKLTNEDPPGLMYLKAFDKNKLLLLAAQIVSYCSNNKNSIKNVPPILIILPLDNATLTELVDKANIFQVIKNEVCAKMPNIELYLKVIPMDFIRNVLVTVDQYVNVAISIYNMLPPKSVKFTHIAHTLPEKVNFRTMQQQQMQQQQQQQQQQQNNSTGSSSIIYYDSYIHLAYSRSVDKEWVFAALSDSYGQGSMTKTWYVGNSRGKFDDACNQIWNIALNLASKKFGKICLILTRLNGILPDDELMNWRRLSGRNIHLAVVCVDDNSKISFIDEDKLYPSFKPIYKDTRFGGRMDMTRLYDYEIRDIDQDIHGIVFQHPFPLAHSQHRCAIRSGALIKFKKCDGDTVWDKFAVNLLNCPHSDSTQLLETILEEFRNLAALNVWYGLSDGEDGHIPWHILAVKKMMNTLVHTRVKIANTSAATVHTATSSSIILSDK

SEQ ID NO: 357 - DNA, 1650 bp, Aspergillus nidulans
atgttagcgtccatcccgcacatggagacgctgcgatccctccctcggaatcccgacgtcgttgcgcgacacccatcggcggaagacctagacgctgcccagcagcttatttcgtccgcccaagccggtcgagaacacccacaggatcgacattacacggataatggatctcggaagtctgaggcgggggctccgcacagtcatcatgagggagagtaccccatagttcagacctccgagactccaatgaacgggcatcatgttgaaaagacatctccgaaatcccaaaaggatacctcgttcctagggcattcttgcagtaattgtggaaccaagagtacccccttatggcggcggtctcctactggagctatgatttgtaatgcatgtggtctctacttgaaagcccgcaatgttgcaaggccgactaaaagaaaccgaacgcaagcaagtcccgaggcgtatcacccgcaaaaccaatccgttggttctcaacctgatcccgctgttactggaagcgaaggttgtactggttcttgcccgggtggtggaaactgcaatggcacaggtggtgcagaaggatgcgacggttgtcctgcctataacaaccgcgtttacaagtcgactgcacgaggaaacgtcgcggcgcatgcgctgaacagggcaggaaattcggatgctgttccgtctccagaggctgaagcacctgcaaggaatagtggacaaccagagggtaatatgctggtggcttgccaaaattgcggaactacagtgacgccgctctggcggcgtgacgagaacggccatccaatctgtaatgcatgcggtctctattataagcttcacggttcctatcgacctaccacgatgaagaagactattatcaaacggcgaaaacgggttgtgccggctctgcgagaaaattccccgactgctgctacccattcttcacacgggtcatctgcatcgccagaagcatcgtcaccagcaactctggcctattcacatgacgagcgccatcgatattacagttcagagcctgttgaccaataccaccggatttcaccggcggcacagaggccatttggattcgcaccaccgccggttgattttacaaatttcaattccggggctgtaacgctacctcaccacccgcctccgcctaggctcctcgagccaggccatccacctctttcccaattcgctcgacgatcaatctcaccgagctcgtcagggaactccaagaaacgaacacttgcagaggccggtgctaatacagacactggccccgttccaactacattagaggccgggtcgaatcaacttccacccattgtctcgtctgctaatccgccaccacccgctcgactaagttcaatatcctctatcctcaaccatgctcacgcccgcgacgaaagtcggttagacccctctcttgctgctttgggccgccaacagcaatctcaaccgcatcacccacaatcttcaccgcttgcacctacccaggcagcctcccagtcactacccggtgtatccaacatggataaccacgttgaagatcgccgcgcgaagctccagcgggaagcggaagagatgcgagaacaactccgagctaaagaaagggagttagcggagctggcgggtcaatga

SEQ ID NO: 358 - protein, 549 aa, Aspergillus nidulans
MLASIPHMETLRSLPRNPDVVARHPSAEDLDAAQQLISSAQAGREHPQDRHYTDNGSRKSEAGAPHSHHEGEYPIVQTSETPMNGHHVEKTSPKSQKDTSFLGHSCSNCGTKSTPLWRRSPTGAMICNACGLYLKARNVARPTKRNRTQASPEAYHPQNQSVGSQPDPAVTGSEGCTGSCPGGGNCNGTGGAEGCDGCPAYNNRVYKSTARGNVAAHALNRAGNSDAVPSPEAEAPARNSGQPEGNMLVACQNCGTTVTPLWRRDENGHPICNACGLYYKLHGSYRPTTMKKTIIKRRKRVVPALRENSPTAATHSSHGSSASPEASSPATLAYSHDERHRYYSSEPVDQYHRISPAAQRPFGFAPPPVDFTNFNSGAVTLPHHPPPPRLLEPGHPPLSQFARRSISPSSSGNSKKRTLAEAGANTDTGPVPTTLEAGSNQLPPIVSSANPPPPARLSSISSILNHAHARDESRLDPSLAALGRQQQSQPHHPQSSPLAPTQAASQSLPGVSNMDNHVEDRRAKLQREAEEMREQLRAKERELAELAGQ

SEQ ID NO: 359 - DNA, 1599 bp, Penicillium chrysogenum
atgttagcgtctctcccacaaatggaagcgcttcactctttacctcggaatcaagtcgttccaatgcgacaaccgtcagcggaagatttggatgctgcgcagcagttgatctcctcagcacaggcaggtcgtgaacatttagcagatcactaccgagaggatggcatggtacaaagatctggtcaacccggatcaaatcaatggaatggacacaatgaaaccccgagtgagaaaacatctcctagtagccaaaaggacacaaccttcctagggcattcatgcagcaattgcggcacaaaaagcactcctctctggcgtcgttctcctaccggagcgatgatctgcaacgcctgcggtctttatctcaaagctcgcaacgtcgctcgccccacgaaacggaatcggatgcaatcagagggtgctgagaagccgccaccacctgcgagctctcattgcggcggttcctcggaaggtggtggttgcaaggggtcatgccctggtggtggaagttgtaacggcactggtggtgcagaaggatgcgatgggtgtccggcatacaacaaccggatatacaagtctgctacccgaggtgcggctgccatccaatcttcctggggtcgtcaccaagcgcacgaacctgagcctgcgacgcaagaggagacaccggtgaaggcccctgctcctgccgatgcctctaacaccttggttgcttgtcaaaattgcggcacaaccgtgactcctctttggcggcgcgatgaacaaggccaccccatttgcaatgcttgtggattgtactataagctccacggatgctatcgccccaccaacatgaaaaagtctattataaaacgtcgcaagcgcgtggttcctgccctacgagatcagtctcccaccgctggtaccctttcttccaatggctcatcgacatccccggaagcatcacctgccgccctggcgcatggccatgatgatcactatcggtatatgagcagcgagcctggggatcactaccagatgatgcctgggaaaactgaagacgcacctcgagccctgccttttgcgccaccgccggttgatttcaccggttacaatgtttcatctgtgccccttgcacatggtccctccatcccccacggcctaccaaaacttttggaagtggagcggctgggacattcgcccgtgtctcagtacgggcgccggtccgtttctccaaacactctcaacgttcccaagaaacgaacattggccgaggctgcaacagaggctctaccagccccatctacgttggaggcaggctcaaatcaactgcctccgattatgtcttcggccaatcctactccacctgggcgtctcagctcaatctcgtccatcttaaaccaatcagatgttcggggcgagcctcgctcggataataacctgggacgtccacctcccatccaccactctgtctccccttcgcctcacccgccgcagcctttgcctggtcttgcatctcttggagactcggttgatcgccgtgcccgacttgaacgcgaagcggagcagatgcgcgagatgctcagagcaaaggagcgcgagctggcagagatgagacgatag

SEQ ID NO: 360 - protein, 532 aa, Penicillium chrysogenum
MLASLPQMEALHSLPRNQVVPMRQPSAEDLDAAQQLISSAQAGREHLADHYREDGMVQRSGQPGSNQWNGHNETPSEKTSPSSQKDTTFLGHSCSNCGTKSTPLWRRSPTGAMICNACGLYLKARNVARPTKRNRMQSEGAEKPPPPASSHCGGSSEGGGCKGSCPGGGSCNGTGGAEGCDGCPAYNNRIYKSATRGAAAIQSSWGRHQAHEPEPATQEETPVKAPAPADASNTLVACQNCGTTVTPLWRRDEQGHPICNACGLYYKLHGCYRPTNMKKSIIKRRKRVVPALRDQSPTAGTLSSNGSSTSPEASPAALAHGHDDHYRYMSSEPGDHYQMMPGKTEDAPRALPFAPPPVDFTGYNVSSVPLAHGPSIPHGLPKLLEVERLGHSPVSQYGRRSVSPNTLNVPKKRTLAEAATEALPAPSTLEAGSNQLPPIMSSANPTPPGRLSSISSILNQSDVRGEPRSDNNLGRPPPIHHSVSPSPHPPQPLPGLASLGDSVDRRARLEREAEQMREMLRAKERELAEMRR

SEQ ID NO: 361 - DNA, 1581 bp, Saccharomyces cerevisiae
atgcctgactctaagtacacaatgcaaggttataaccttgttaagctattaaaaaggctagaagaagccactgcaagattagaggatgtcaccatctatcaagaaggttatattcagaataaattggaggcatctaaaaataacaagccttccgactccggggccgatgcgaatactacgaatgaaccttctgcagaaaatgctcctgaagtagaacaagatccgaaatgcataactgcgttccaatcttacatcggtgagaatattgatccgctggtagaattatcaggaaagatcgacacggtggtcttagatgctttgcagttgctaaagggaggctttcaatcgcaattgacttttttaagagctgctgtgagatcaagaaaaccggattattcttctcaaactttcgctgattctttaagacctatcaacgaaaatattataaagctgggtcaattgaaggaatcaaaccgtcaaagcaaatacttcgcatatttgagcgctttatctgagggtgctcctttgttctcctgggttgcagtggacactcccgtgtctatggtcacagatttcaaggacgcagcacagttttggactaatagaattttgaaagaatacagagagtctgatcctaatgctgttgaatgggttaagaaatttttggcctctttcgataatttgaaagcctacattaaagagtatcatactactggggtttcctggaaaaaagacggtatggattttgctgacgcgatggcacaatcaacgaagaatacaggtgctacttcatctccttcgccagcaagtgctacagcggctccagcaccaccacctcctccaccagccccaccagcttccgtctttgaaatctctaatgatacaccagcaacgagtagtgatgctaacaaaggcggtattggcgcggtcttcgccgaactaaatcagggtgaaaatatcactaagggtttgaaaaaagtagacaaatcccaacaaactcacaaaaatcctgaattacgtcaatcctctacagtttcttccacaggaagtaaatccggtccaccaccaaggccaaaaaagccatcaacattgaaaactaagaggcctcctagaaaggaattggtaggaaacaaatggtttattgagaattacgaaaatgaaactgaatctctggttattgatgcaaataaagatgagtctatcttcataggtaaatgttctcaagttcttgttcaaataaaaggaaaagttaacgctatctcgttgagtgaaactgagtcatgcagtgttgttcttgattctagcatttccggtatggatgtcatcaaatccaacaagtttggcattcaagttaaccattccctacctcaaatctccattgataaatctgacggcggtaacatctatttatccaaggaatccttgaatactgaaatctacacctcgtgctcaactgctattaacgtcaacttaccaatcggcgaggacgatgattacgtagaattcccaatccctgaacagatgaagcatagcttcgctgatggtaagttcaaatctgctgttttcgaacatgctggttaa

SEQ ID NO: 362 - protein, 526 aa, Saccharomyces cerevisiae
MPDSKYTMQGYNLVKLLKRLEEATARLEDVTIYQEGYIQNKLEASKNNKPSDSGADANTTNEPSAENAPEVEQDPKCITAFQSYIGENIDPLVELSGKIDTVVLDALQLLKGGFQSQLTFLRAAVRSRKPDYSSQTFADSLRPINENIIKLGQLKESNRQSKYFAYLSALSEGAPLFSWVAVDTPVSMVTDFKDAAQFWTNRILKEYRESDPNAVEWVKKFLASFDNLKAYIKEYHTTGVSWKKDGMDFADAMAQSTKNTGATSSPSPASATAAPAPPPPPPAPPASVFEISNDTPATSSDANKGGIGAVFAELNQGENITKGLKKVDKSQQTHKNPELRQSSTVSSTGSKSGPPPRPKKPSTLKTKRPPRKELVGNKWFIENYENETESLVIDANKDESIFIGKCSQVLVQIKGKVNAISLSETESCSVVLDSSISGMDVIKSNKFGIQVNHSLPQISIDKSDGGNIYLSKESLNTEIYTSCSTAINVNLPIGEDDDYVEFPIPEQMKHSFADGKFKSAVFEHAG

SEQ ID NO: 363 - DNA, 3753 bp, Saccharomyces cerevisiae
atgtctaaaaatagcaacgttaacaacaatagatcccaagagccaaataacatgtttgtgcaaaccacaggaggtggtaaaaacgccccaaagcagattcatgttgcacacagacgttcccaaagtgagttgacaaatttgatgattgaacaattcactttgcagaagcagttggagcaagttcaagcacagcagcaacagttgatggctcagcaacagcaattggcacaacagacaggacaatacctgtcaggaaattctggctctaacaatcatttcacgcctcaaccgcctcaccctcattacaactcaaacggtaattcacctggtatgagtgcaggtggcagcagaagtagaactcactccaggaacaactccggatattatcataattcatatgataacaataacaatagcaataatcctgggtctaactcacacagaaagacgagttcacaatccagcatatatggccattccagaagacattctttaggtctaaatgaagcgaaaaaggctgctgcggaagaacaagctaaaagaatatctgggggtgaagcaggcgtaactgtgaagatagattctgttcaagctgatagtggctcaaattctactacagaacaatctgattttaaatttccaccaccaccaaatgctcatcagggccatcgtcgcgcaacttcaaacctatcacctccctctttcaaatttcctccaaactctcacggggataatgacgatgaattcatagcaacctcttcaacgcaccgccgttcaaagacaagaaacaatgaatattctccaggcattaattccaactggagaaaccaatcacagcaacctcaacagcagctttctccattccgccacagaggatctaattcaagggattacaattccttcaataccttagaacctcctgcgatatttcagcagggacacaaacatcgtgcctctaattcatcagttcatagtttcagttcacaaggtaataataacggaggtggacgtaagtccctatttgcaccctaccttccccaagccaacattccagagctaatccaagaagggagactagtagctggtatattaagagttaataaaaagaatagatcggatgcctgggtctctacagatggcgctcttgatgcggatatttacatttgcggctccaaagatcgtaatagagcacttgaaggtgatttagtcgcggtagaactattagttgtggacgatgtttgggagtccaagaaagaaaaggaagaaaagaagaggagaaaggatgcctctatgcaacacgatctaattcctttgaacagtagtgacgattaccacaacgatgcatctgttactgctgcaacaagcaacaattttctatcttctccctcctcgtctgattcgctaagcaaggatgatttatccgtcagaagaaagaggtcatctactatcaataatgatagtgattccttatcatctcctaccaaatcaggagtaaggagaagaagttcattgaaacaacgtccaactcaaaagaaaaatgacgatgttgaagttgaaggtcagtcattgttattagttgaagaagaagaaatcaacgataaatataagccactttacgcaggccatgtcgttgctgttttggaccgtatccctggtcagttatttagcggtacattaggtttgttgagaccatcccaacaagctaatagcgacaataacaaaccaccacaaagcccaaaaattgcttggttcaagcctactgataagaaggtgccattaattgcaattcctacagaattagctccaaaggactttgttgaaaacgctgataaatactccgaaaagttattcgttgcctctattaaacgttggccaatcacatctttgcatccatttggtattttagtttccgaacttggagatattcacgatcctgatactgaaattgattccattttaagggataacaattttctttcgaatgaatatttggatcaaaaaaatccgcaaaaagaaaaaccaagttttcagccgctaccattaacggctgaaagtctagaatataggaggaattttacggacactaatgagtacaatatctttgcaatttccgagcttggatgggtgtctgaatttgccttacatgtcaggaataacggaaatggtaccctagagctgggttgtcatgttgttgatgtgaccagccatattgaagaaggctcctctgttgataggcgtgcgagaaagaggtcctctgcggtgttcatgccacaaaaacttgtcaatttattaccacaatcgttcaacgacgaactgtcgttggcccctggcaaggaatcagccacgctgtcggttgtttacactctagactcatctactttaaggattaaatctacttgggtaggcgaatctacaatttccccctcaaacatcttgtctttagaacaattagacgaaaaattatctactggaagtcccactagctacctctctactgtacaggaaattgctagatcattttatgctagaagaataaatgatccagaagctacattacttcccaccctgtccttattggaaagcttggatgacgaaaaagttaaggttgacttgaacatcctggatagaactttaggctttgttgtaattaatgagattaaaagaaaggtcaactccactgttgcagagaaaatttacaccaaacttggtgatctagctcttttgagaaggcagatgcaacccattgcaaccaagatggcgtcatttagaaagaaaattcaaaattttggttacaattttgataccaatacggcggatgaattaatcaaaggggtgctaaaaattaaagatgacgatgttagagtcggaattgaaattttactgtttaaaaccatgccaagagctagatactttattgctggcaaagtagacccggaccaatatgggcattatgccttgaacctacctatctacacacatttcacagcgccaatgagaagatacgctgatcatgtcgttcataggcaattaaaggccgttatccacgatactccatacaccgaagatatggaagctttgaagattacctccgaatattgtaattttaaaaaggactgtgcttatcaagcacaggaacaagcaattcatctattgttgtgtaaaacaatcaacgacatgggaaatactacaggacaattattaacaatggctactgtcttacaagtttacgagtcctcctttgatgtatttattccagaatttggtattgaaaagagagttcatggagatcaactacctttgatcaaagctgagtttgatggtaccaatcgtgtcttggaattgcattggcagcccggcgtagatagtgcaacttttataccagcagatgaaaaaaatccaaaatcctatagaaattccattaagaacaaattcagatccacagccgctgagattgcgaatattgaactagataaagaagcggaatctgaaccattgatcagcgatccattgagtaaggaactcagcgatttgcatctaacagtaccaaatttaaggctaccatctgcaagcgacaacaagcaaaatgctttagaaaaattcatttctactactgaaaccagaattgaaaatgataactatatacaagaaatacatgaattgcaaaagattcctattctattgagagctgaggtggggatggctttgccatgtttaaccgtccgtgcattaaatccattcatgaagagggtataa

SEQ ID NO: 364 - protein, 1250 aa, Saccharomyces cerevisiae
MSKNSNVNNNRSQEPNNMFVQTTGGGKNAPKQIHVAHRRSQSELTNLMIEQFTLQKQLEQVQAQQQQLMAQQQQLAQQTGQYLSGNSGSNNHFTPQPPHPHYNSNGNSPGMSAGGSRSRTHSRNNSGYYHNSYDNNNNSNNPGSNSHRKTSSQSSIYGHSRRHSLGLNEAKKAAAEEQAKRISGGEAGVTVKIDSVQADSGSNSTTEQSDFKFPPPPNAHQGHRRATSNLSPPSFKFPPNSHGDNDDEFIATSSTHRRSKTRNNEYSPGINSNWRNQSQQPQQQLSPFRHRGSNSRDYNSFNTLEPPAIFQQGHKHRASNSSVHSFSSQGNNNGGGRKSLFAPYLPQANIPELIQEGRLVAGILRVNKKNRSDAWVSTDGALDADIYICGSKDRNRALEGDLVAVELLVVDDVWESKKEKEEKKRRKDASMQHDLIPLNSSDDYHNDASVTAATSNNFLSSPSSSDSLSKDDLSVRRKRSSTINNDSDSLSSPTKSGVRRRSSLKQRPTQKKNDDVEVEGQSLLLVEEEEINDKYKPLYAGHVVAVLDRIPGQLFSGTLGLLRPSQQANSDNNKPPQSPKIAWFKPTDKKVPLIAIPTELAPKDFVENADKYSEKLFVASIKRWPITSLHPFGILVSELGDIHDPDTEIDSILRDNNFLSNEYLDQKNPQKEKPSFQPLPLTAESLEYRRNFTDTNEYNIFAISELGWVSEFALHVRNNGNGTLELGCHVVDVTSHIEEGSSVDRRARKRSSAVFMPQKLVNLLPQSFNDELSLAPGKESATLSVVYTLDSSTLRIKSTWVGESTISPSNILSLEQLDEKLSTGSPTSYLSTVQEIARSFYARRINDPEATLLPTLSLLESLDDEKVKVDLNILDRTLGFVVINEIKRKVNSTVAEKIYTKLGDLALLRRQMQPIATKMASFRKKIQNFGYNFDTNTADELIKGVLKIKDDDVRVGIEILLFKTMPRARYFIAGKVDPDQYGHYALNLPIYTHFTAPMRRYADHVVHRQLKAVIHDTPYTEDMEALKITSEYCNFKKDCAYQAQEQAIHLLLCKTINDMGNTTGQLLTMATVLQVYESSFDVFIPEFGIEKRVHGDQLPLIKAEFDGTNRVLELHWQPGVDSATFIPADEKNPKSYRNSIKNKFRSTAAEIANIELDKEAESEPLISDPLSKELSDLHLTVPNLRLPSASDNKQNALEKFISTTETRIENDNYIQEIHELQKIPILLRAEVGMALPCLTVRALNPFMKRV

SEQ ID NO: 365 - DNA, 2139 bp, Saccharomyces cerevisiae
atgctcaattctgcgttactgtggaaggtttggctacgaatagacaactccactgatgaagtaaaccaaccaattgctgtacagttcgatgaaatagatactgttgatgatttgaagagcaggttttttcagaaactgagttcgactcgatggcgagaaattaacgataatgcttccattgcaataggcctctacgcacctaaatttgacaatcaagccgacaataccagtagtaacaacactaacgataatagttgtcgaagtaagagtaacggtgctggaagtggcgccaacctttccgttaatagcaataccaagagttcagtgagccccacagcaggatcatttggtctttcaaaagaccttgcaaaggacaggaatgttctccagcatcctaaacctacgcagaaaagaggagcattatacgacgcctttgccgccgtgccgacagtggccgcgactaccaatgtggattttcctcccaacgaggcgccaatgctaagcccgcaaagaccatactctactagtcctaaacagtttccagcaacaactaaaagtccgttactgcgatttgcctcagtctcaccctaccctaaatttcattctgataatcaaattatggcatcagctggtcttacatacgtctcaccgcataataaaaataaatacacaaggccgttgattagaaaaggtttaaattttaccacagaatcagttaatgattgcacttataaaatcatctttgaaccggatgaattggctattaacatatataaggaactattcggaaccatgggttcccaacctgcatcgcagcctttgctgatattttcgaatgttaatttacgccaggatgtaccgcctttagatatcttaaatgttgtagactatgttcctacgaatgaagaaatttcgcagcagaaaactcaaccaacagaccatggggccgttggtgtttttcatctagacgaccatatttctccgggcgaacaaggtcttaagcaaacaattggtgataaagcagatcttaaaggtaaagatggcaatagcagccctcaggaatttaaattaataactgatgaagagcaattgagaagagcgtcacaagaactgaaggatgaggaaaaggatgccgagtctccttggcaagcaatcttgctgttaccaaaaggttataaaggaggggtagattttcgaaataaaccagtggcccacacggattcatctttcaataatgaagacacaattactcattcagagttagaagtgaacaccggatccccttcgcaagaaagcggatcacttaatgaagctggtataggcataacgcaacccatgtcggaagtacaaagaagaaaagaagacgttacgcccgcatcaccaatattaacaagtagtcaaacgccgcattactcaaactcgctttataacgcaccttttgctgtttcctctccaccagatcctttaccaaacctttttaccaccacaagtgaaaaagttttccccaaaattaatgttttaatagttgaagacaacgtcatcaaccaagctatcttaggttcctttctgaggaaacacaaaatctcatataaactggctaaaaatggtcaagaagctgttaatatttggaaggaaggcggtcttcatttaatatttatggatttacagctgcctgtcttgtctggtatagaagctgccaagcagattagggacttcgaaaaacaaaatggcattggcattcaaaaaagtctcaataactcacactccaatcttgaaaaaggtacttcaaagagattctctcaggcgcccgtgattattgtagcattgaccgcatctaactctcagatggataaaagaaaagcacttctttctggttgtaacgactacctgactaaaccagtgaatttacactggcttagtaagaaaattacagagtggggatgtatgcaagccttgattgattttgacagctggaagcagggagaaagccggatgaccgacagtgttttggttaaatctccacagaaacctattgcaccttccaaccctcactcattcaaacaagcgacatctatgacccctacacacagcccagtaagaaaaaattcaaacctctcgcccactcaaatagaattgtga

SEQ ID NO: 366 - protein, 712 aa, Saccharomyces cerevisiae
MLNSALLWKVWLRIDNSTDEVNQPIAVQFDEIDTVDDLKSRFFQKLSSTRWREINDNASIAIGLYAPKFDNQADNTSSNNTNDNSCRSKSNGAGSGANLSVNSNTKSSVSPTAGSFGLSKDLAKDRNVLQHPKPTQKRGALYDAFAAVPTVAATTNVDFPPNEAPMLSPQRPYSTSPKQFPATTKSPLLRFASVSPYPKFHSDNQIMASAGLTYVSPHNKNKYTRPLIRKGLNFTTESVNDCTYKIIFEPDELAINIYKELFGTMGSQPASQPLLIFSNVNLRQDVPPLDILNVVDYVPTNEEISQQKTQPTDHGAVGVFHLDDHISPGEQGLKQTIGDKADLKGKDGNSSPQEFKLITDEEQLRRASQELKDEEKDAESPWQAILLLPKGYKGGVDFRNKPVAHTDSSFNNEDTITHSELEVNTGSPSQESGSLNEAGIGITQPMSEVQRRKEDVTPASPILTSSQTPHYSNSLYNAPFAVSSPPDPLPNLFTTTSEKVFPKINVLIVEDNVINQAILGSFLRKHKISYKLAKNGQEAVNIWKEGGLHLIFMDLQLPVLSGIEAAKQIRDFEKQNGIGIQKSLNNSHSNLEKGTSKRFSQAPVIIVALTASNSQMDKRKALLSGCNDYLTKPVNLHWLSKKITEWGCMQALIDFDSWKQGESRMTDSVLVKSPQKPIAPSNPHSFKQATSMTPTHSPVRKNSNLSPTQIEL

SEQ ID NO: 367 - DNA, 4740 bp, Saccharomyces cerevisiae
atgtcgcattcagactacttcaattataagccttacggcgattccacggaaaagcccagcagctccaagatgaggcagtcatcttcatcatcttcatctagactaaggtcggaaagtttagggcgaaattccaatactacgcaggctcgagtagcgtcatcgcccatcagcccagggctgcattctacccagtactttagatcaccaaacgctgtttacagccctggagagtctccattaaatacagtacagctattcaatcgtcttccgggtatacctcaaggtcagttttttcatcaaaatgccatttctgggtcctccagctcctcggcaagatctagtagacggccctcgaatattggtcttcctctaccaaaaaatcctcagcagtctctaccgaagttgtctactcaacctgttcctgtacataagaaagttgaggctagtaaaacagagagcgagattattaagaagcccgctcccgtgaatagtaatcaagatccattattgacgaccccaacgttagtgatatcaccagaactggcttcactaaatacaacgaatacatcgattatgtcaacgccacaaaatattacaaaccaaacttcgaacaaacacattcccaccagatcgcaaccaaatgggtcaacaagttcctccactttgcaggatattgtcacgacaaatagctcgcaacggtctgtaggccaccatggtggaagcacaacgagcctccgaacatacaaaaaacaatatgtattaaatgaacagttatatttaagaaaaatgagaaaccgtgctaatgatgattattacactagaggtatagtcgcatcatccaactttgaagatgacgaagaaaattttagtaacaaaggtgaagatgacttagaactagaaatggatgatcttttaaaggtagaaggtgaggataaagataacgacttcaattttggttataattttattacgtcgagcacaaaaaataatgaaaatgttgtttcgatgagcctaaattatctaaagggcaaattggattggttgagggatgtgaacaatgatcaaccgtgtgaaatagaagatgaggagtggcattccatactggggagcgaggatttgctgtcaaaattgttacaaaatcctatggtgaacaaccgatttgaatggcaaacaatgttatctaaggtactgaagggagatattgtgaggaatgaaaaaacgaagattgcaaatcaagggaaaggccctggcttcaatactcagttttcagatgacatttggattgagttgaaggcatggatgaatgggaggaccgtggaagatcagaacaaatctctgaggatttttagggattctactgactccgtatttcaagaaatcatggcctttaaactagaagataatatgagcgctgacgaggctgcagagactatcaaatcactagtagacaaatattatagagtcttaaatctatggcctaacattaaaagaatgcatgctgaaaaacccattactaaaacagaagcattcaggaatcgaatagatactttgaatagttggcttaatttcaaatttaactttgatactaatattgcgtacctgaaaaaatggatagttggcaataaagagctagaaagcactaccgaagtggataacaccaccgtgaatttggatgatccagccgttttcgccactaattgtaaacgctttgcggagcaaattatgaaggaaaaggatattgaactgatatttcaaaaaaaaatattctttccattagcaccatggattttgaaggccaaatttttcttcttgaaataccaaaaaacttggaatgaattgaatctatcttatttggatcaagatctggaatttttattgatgtttccaatgcgtttggtaaaagatataatactaattcgcctatcttacgcgaagaaaatacagaatccaaccttgatgatgatcgatcaaatgatggacgattttagtacatatattaagttggcagtccaaatgaaattcactgttgcttcttactgtaatgactggttttttaaagtgaaaatcgatcccgaatttgatcataccgttgttgaaggattggaatattttttctccattttggaactgagaatattatatagtggcaaaaactcattcaagacttctaaagaacctgatctgttattaaaatattgggaaatgtttagaaacgtcggctattatattgatgatgcaggcgaactgatcgcagcagaatttacgaagttgacacttagattggttcacagattgcacgcttaccttttaaggcagcaaaacactccgccaaaattagagaatgaagctgctgctgaaaaatggctggtgcaaatattcgaaatacttggatccatgaaaagaaaactcaatagattcaccaatattttgacaaaagcatttcaaaattttgtccgctacaagatagaagatcacaactatctgctaaagcaactaaaagaaacaggccactttcttatatacacaggaggttacctagagcaaaatggtacttatttaattggtagcccagagctattaggctgtaaagatgatgatattttaagaatcattaagaattcagacatcggttgtgatttagtgcctaagctagaaattaataacagtctgacaatttataatgctttggatgataattggaactccaactcatcactgggttcagatatctcgaatgatggtaccccattttattatatcaaaaacgatttgaccacccagcctagatcttataacggtaatagagtcaatcgtgaaccggattttgaaaacagcaggagcacggaggaagagttttatgaactggagacaagattgaactctcttggttatgtattggtattgactccgcaagagccattactttgggagggtgagatgtataatctatccgataacaaaacaattaaaccagagggattgaacttgaaagtaattcctaattcaatagatttgatgtgccaaggatccagttatgccttagaataccaatgtgacaggttccaacagatatctggtagctcagtttctttcttggaaaaaaaatcttcctcagaaacggttaaaaacaacttacaaaggataaataaagcatatttcagatgcacgtacagtgttctgaagaactatacaaagattgtgaccacgttcaagaaggtaagtcctgtcaatgatttattgaataatattttcctttttgggagggattttggtctgaactttttgagaattaatgttgccaacaatgaaaaaagatccattataatacttttaatgatgcggttaagtatcggatggctgaagttcttagctgaagactgtgatccgactgatcaaagggtatttaggtggtgtgtcacgtcaatggagttcgcgatgcatatggtaagcggttggaacatactagctcttgatgaatgccaattttcttctttaaaacaaaaaatttcagaatgcatgtcattacttatttctcattttgatataataggcgcacgctccatagaagttgagaaaatcaatcaacaagctagatcaaatcttgatttggaagatgtgtttgacgatgatatgatgctacaagtgaattccgagttccgagtacaaagtataatggaattggaagaaaggataaagcggaatcctcatcaaactggtaaagtaattgatgatagtgacaaaggtaacaagtaccttgtttctttggcatcttccatatcgaacgtttctatgagatggcaaaagaggaactttattggtggcggtacttttggaagggtatattctgctgttgatttggataatggtgagattttagcagtcaaggaaatcaatattcaagatagcaaatcaatgcaaaaaatattccccttaatcaaggaggaaatgagtgtcttagagatattgaaccatccaaatatagtttcatattacggtgttgaagttcatcgtgataaagttaacatctttatggaatattgtgaaggcggttccctagcagctcttttggagcatggtcgtattgaagatgaaatggtcactcaagtctacactttacaattgctagaaggacttgcatatttgcatgaatccggcattgttcaccgtgatgttaaacccgaaaacatcctactagattttaatggtgttattaagtatgttgattttggtgctgctaaaaaaattgctaataatggaactagattggcaagtatgaacaaaatcgaaaacgcagatggtgaacacgaagatgttacccatgtttctgattcaaaggcagtgaaaaataacgaaaatgctctattagacatgatgggaactcctatgtacatggctccagaatccatcactggatctaccaccaaaggcaaacttggggcagacgatgtttggtcgttaggctgcgtggtattagaaatgatcactggtagacggccatgggctaacttagataatgaatgggctatcatgtaccatgttgctgcaggacataccccacaattccctactaaggatgaagtgtcgtctgctggtatgaaatttctggaaagatgtcttattcaaaacccctccaagagagccagtgcggttgagctgttgatggatccttggattgtacaaattagagaaatagcctttggcgacgattcttcctctacagatactgaggaaagagagtag

SEQ ID NO: 368 - protein, 1579 aa, Saccharomyces cerevisiae
MSHSDYFNYKPYGDSTEKPSSSKMRQSSSSSSSRLRSESLGRNSNTTQARVASSPISPGLHSTQYFRSPNAVYSPGESPLNTVQLFNRLPGIPQGQFFHQNAISGSSSSSARSSRRPSNIGLPLPKNPQQSLPKLSTQPVPVHKKVEASKTESEIIKKPAPVNSNQDPLLTTPTLVISPELASLNTTNTSIMSTPQNITNQTSNKHIPTRSQPNGSTSSSTLQDIVTTNSSQRSVGHHGGSTTSLRTYKKQYVLNEQLYLRKMRNRANDDYYTRGIVASSNFEDDEENFSNKGEDDLELEMDDLLKVEGEDKDNDFNFGYNFITSSTKNNENVVSMSLNYLKGKLDWLRDVNNDQPCEIEDEEWHSILGSEDLLSKLLQNPMVNNRFEWQTMLSKVLKGDIVRNEKTKIANQGKGPGFNTQFSDDIWIELKAWMNGRTVEDQNKSLRIFRDSTDSVFQEIMAFKLEDNMSADEAAETIKSLVDKYYRVLNLWPNIKRMHAEKPITKTEAFRNRIDTLNSWLNFKFNFDTNIAYLKKWIVGNKELESTTEVDNTTVNLDDPAVFATNCKRFAEQIMKEKDIELIFQKKIFFPLAPWILKAKFFFLKYQKTWNELNLSYLDQDLEFLLMFPMRLVKDIILIRLSYAKKIQNPTLMMIDQMMDDFSTYIKLAVQMKFTVASYCNDWFFKVKIDPEFDHTVVEGLEYFFSILELRILYSGKNSFKTSKEPDLLLKYWEMFRNVGYYIDDAGELIAAEFTKLTLRLVHRLHAYLLRQQNTPPKLENEAAAEKWLVQIFEILGSMKRKLNRFTNILTKAFQNFVRYKIEDHNYLLKQLKETGHFLIYTGGYLEQNGTYLIGSPELLGCKDDDILRIIKNSDIGCDLVPKLEINNSLTIYNALDDNWNSNSSLGSDISNDGTPFYYIKNDLTTQPRSYNGNRVNREPDFENSRSTEEEFYELETRLNSLGYVLVLTPQEPLLWEGEMYNLSDNKTIKPEGLNLKVIPNSIDLMCQGSSYALEYQCDRFQQISGSSVSFLEKKSSSETVKNNLQRINKAYFRCTYSVLKNYTKIVTTFKKVSPVNDLLNNIFLFGRDFGLNFLRINVANNEKRSIIILLMMRLSIGWLKFLAEDCDPTDQRVFRWCVTSMEFAMHMVSGWNILALDECQFSSLKQKISECMSLLISHFDIIGARSIEVEKINQQARSNLDLEDVFDDDMMLQVNSEFRVQSIMELEERIKRNPHQTGKVIDDSDKGNKYLVSLASSISNVSMRWQKRNFIGGGTFGRVYSAVDLDNGEILAVKEINIQDSKSMQKIFPLIKEEMSVLEILNHPNIVSYYGVEVHRDKVNIFMEYCEGGSLAALLEHGRIEDEMVTQVYTLQLLEGLAYLHESGIVHRDVKPENILLDFNGVIKYVDFGAAKKIANNGTRLASMNKIENADGEHEDVTHVSDSKAVKNNENALLDMMGTPMYMAPESITGSTTKGKLGADDVWSLGCVVLEMITGRRPWANLDNEWAIMYHVAAGHTPQFPTKDEVSSAGMKFLERCLIQNPSKRASAVELLMDPWIVQIREIAFGDDSSSTDTEERE

SEQ ID NO: 369 - DNA, 3996 bp, Saccharomyces cerevisiae
atgatgatggatatactgaatacacagcaacaaaaagcggctgaaggcgggagagttctggctcctcataccatctcaagtaagctcgtgaagagattatcaagtcattccagccataaactatcaagatctgatttgaaagcattgggtggctcggaaacaataagcgacggccccagtcagctgacttttaaggaccgatacgttttcaatgaatcgctatacttgaaaaagctaaaaaagaccgctttagatgactactacacgaggggcataaaactcactaaccgctacgaggaagacgacggtgatgacgaaattattcggttgtctaatggcgacagaattgatgaagacctgcactcaggtgtcaagtttttctccactacaccttattgcaggaaaatgaggtcagacagtgatgaactagcttggaatgaaattgcgaccgaacggttcaaatggcagtcaatgctggccagagtgctgaagggagatattgttaaaggtgaaaagacgaggattgctaaccaagtcaagaaaccagggttaaataaggagctctcagatgagatatggctcgaattgaaggcatggctgaatgggaggaccatgcaagagatggaacagtcgcttacatatttaagagatagttcagattccgtttttgaagagataatgaagtttcaaattccacagggcaagatattgagcctggatgcactggaggccatcttacaagacctcatgaacagatatcacagcgttgtctcttattggcctaacttgaaaaaaatgtataaggataaaccaatcaccaatactgcagaatttaccgctagaatagacgtaatgaattcttggctgaactttaaaacgaacttaacgttgaggaggcaagagttggacgactggataaaccgtttctcaccgataagtagttcggataattgccaagaggattttgatggtgtgccccaatggaactgcaaaatgaagattcttgcagaacaattgatgaaggaaaagaacatcgagtctatattccaaaaaaaaattttctatccgctatcaccttggatgttcaaactgaaactacattttatagtctacagagaaactttgacaaagatgaacataaaatatccttatgaaaggttaagatcactactggcgttccccgtctatttaatcaaagaagttattttgactagattgtcatatgcacgaaagcttaaaaatccaacaatgatgatgatcgatcaaatgatcgatgattttaacgcttttattcgactttctgtgcaattgaagtacacactgacaaaatattgctccaatttgccgttcgatgtggattttgacccgacgttcgaaaatactgtaatagaagccattcgttatttattttttctgttgaatttaaagttgattgattccagtaaacaaaatttcaaagcacccgatctactcttgaaatactgggatcacctaaaaaacaccggtcactatattaacggtgcagaaaccgtgattccaaatgaatttctcaagttaactttgagactcgtacataaattgcaattctatcttttgaaacaacaaaacttcccaccaacatttgctaacgcttcagaagcagaaaaatggctaagttccattttcgaaaatttgggtgccatgaaaagaaagctgaacaggttcagcaatattctagtcaaggcgttccaaaattctgctgtttatcagattaatcataatgcacaacttgttaaaaagttaaaagatgctcactattttttggtatactccggtaacacttttgagtctagtggtgtatatatgtttgctgctcctgaattattaggttgtgacaatgataccatcttaagaattttgcgaaataaatccattggctgtgatttggtcccaaagcttgacattggaaataatttgaatgtgtatgatataacaacaaaagaaacagatttgaacattctagtatcgaaaggggaggattccaaaggaattccttactaccgagtagtagcaaattcgtcaagtgatttggacaggcatgctcatcagtccaaaaagaagaatttttcaacagacccttttgatcagcaccttgatgaaaagaacaatgaagtttttgaattggaagttgctttgagctcattgggtgcactagttgtactatatcctggagagccagtagtttgggatggaccagtatataagcttccaggtaacaacctttttgcatccaacgaaatggatttagggaaaattggtaacccaaatacgttgattttactcaatcaaggttctaattatgcactgacttatcaaatcgacaagtttaatcaaacggtaggtgattctgtttcattcatagagaaacgttgttcactcaattcaattgaatcctccctacaaaaaatcaataaggcatattacaaacttacttatacagtattgaacaactacaaaggaattctaggtagctttatgaagcaatgtccgggaaatgagttgttaaattcgatattcatgtttggaagggattttggaagaagtttccttaaatataacgcctttagctcaaagaggaagtacgttatcatctttctgatggttaaattaggaatgaactggttgaaattccttgttgaagagtgtgatcctaccgatcagcgaactttccgatggtgcgttcttgcaatggattttgcgatgcagatgactagtggttataatatcctggcgctgaatgtaaagcaatttcaagaactgaaggagagggtatcagtatgtatgtcattattaatttcacatttcgacgttatgggtgcacgagccactgaagctgaaaatggcatgcaacaggcaagattgaatattgatactgaagagaatattgatgaagaggccaccctagaaataaacagcaggttgagactggaagctataaagacgttggaaaagactatgaagaggaatcccaggcaaatgggtaaggtattggatgctacagatcagggaaacaaatacctactatcgctagcatcctcattatcgaatgtatcaatgaggtggcaaaaaagaagcttcattggcggtggaacatttggacaggtatactctgcaattaatctggaaaacggtgaaatcttagctgttaaggaaataaagatacacgataccacaacaatgaagaagatttttcccctgattaaagaagagatgaccgtattggaaatgttaaaccatcctaatattgtccagtactatggtgtcgaagtacatcgcgataaagttaacatcttcatggaatactgtgagggtggttctttagcctcgttattggatcatggaagaattgaagatgaaatggtaacacaagtgtacacattcgaactattagaaggtttggcatatttgcaccaatctggcgtggtgcatcgcgacattaaaccggagaatatcttgctggatttcaatggaatcataaaatatgtggattttggtacggcacgtaccgttgtaggatctaggactagaactgtgcggaacgcagccgttcaagattttggagtagaaacaaagtccctcaatgaaatgatggggacaccgatgtatatggctccagagactatttcaggctcggcagttaagggaaaacttggagcggacgatgtatgggcattaggatgtgttgtgctagaaatggccacaggtagacgaccttggtctaacttggataatgaatgggccatcatgtaccacgttgctgcaggtcgaataccgcaactacccaatagagacgaaatgactgcagcgggaagagccttcttggaaaggtgtttggttcaagaccccactatgagggctactgctgtggaactactgatagacccttggatgatacaaatccgtgaaatagcatttggcaactcagagaaagatcaagtacctatcctaagctcatag

SEQ ID NO: 370 - protein, 1331 aa, Saccharomyces cerevisiae
MMMDILNTQQQKAAEGGRVLAPHTISSKLVKRLSSHSSHKLSRSDLKALGGSETISDGPSQLTFKDRYVFNESLYLKKLKKTALDDYYTRGIKLTNRYEEDDGDDEIIRLSNGDRIDEDLHSGVKFFSTTPYCRKMRSDSDELAWNEIATERFKWQSMLARVLKGDIVKGEKTRIANQVKKPGLNKELSDEIWLELKAWLNGRTMQEMEQSLTYLRDSSDSVFEEIMKFQIPQGKILSLDALEAILQDLMNRYHSVVSYWPNLKKMYKDKPITNTAEFTARIDVMNSWLNFKTNLTLRRQELDDWINRFSPISSSDNCQEDFDGVPQWNCKMKILAEQLMKEKNIESIFQKKIFYPLSPWMFKLKLHFIVYRETLTKMNIKYPYERLRSLLAFPVYLIKEVILTRLSYARKLKNPTMMMIDQMIDDFNAFIRLSVQLKYTLTKYCSNLPFDVDFDPTFENTVIEAIRYLFFLLNLKLIDSSKQNFKAPDLLLKYWDHLKNTGHYINGAETVIPNEFLKLTLRLVHKLQFYLLKQQNFPPTFANASEAEKWLSSIFENLGAMKRKLNRFSNILVKAFQNSAVYQINHNAQLVKKLKDAHYFLVYSGNTFESSGVYMFAAPELLGCDNDTILRILRNKSIGCDLVPKLDIGNNLNVYDITTKETDLNILVSKGEDSKGIPYYRVVANSSSDLDRHAHQSKKKNFSTDPFDQHLDEKNNEVFELEVALSSLGALVVLYPGEPVVWDGPVYKLPGNNLFASNEMDLGKIGNPNTLILLNQGSNYALTYQIDKFNQTVGDSVSFIEKRCSLNSIESSLQKINKAYYKLTYTVLNNYKGILGSFMKQCPGNELLNSIFMFGRDFGRSFLKYNAFSSKRKYVIIFLMVKLGMNWLKFLVEECDPTDQRTFRWCVLAMDFAMQMTSGYNILALNVKQFQELKERVSVCMSLLISHFDVMGARATEAENGMQQARLNIDTEENIDEEATLEINSRLRLEAIKTLEKTMKRNPRQMGKVLDATDQGNKYLLSLASSLSNVSMRWQKRSFIGGGTFGQVYSAINLENGEILAVKEIKIHDTTTMKKIFPLIKEEMTVLEMLNHPNIVQYYGVEVHRDKVNIFMEYCEGGSLASLLDHGRIEDEMVTQVYTFELLEGLAYLHQSGVVHRDIKPENILLDFNGIIKYVDFGTARTVVGSRTRTVRNAAVQDFGVETKSLNEMMGTPMYMAPETISGSAVKGKLGADDVWALGCVVLEMATGRRPWSNLDNEWAIMYHVAAGRIPQLPNRDEMTAAGRAFLERCLVQDPTMRATAVELLIDPWMIQIREIAFGNSEKDQVPILSS

SEQ ID NO: 371 - DNA, 2901 bp, Saccharomyces cerevisiae
atgaatccgggcggtgaacaaacaataatggaacaacccgctcaacagcaacaacaacagcaacaacaacagcagcaacagcaacagcaggcagcagttcctcagcagccactcgacccattaacacaatcaactgcggaaacttggctctccattgcttctttggcagaaacccttggtgatggcgacagggccgcaatggcatatgacgccactttacagttcaatccctcatctgcaaaggctttaacatctttggctcacttgtaccgttccagagacatgttccaaagagctgcagaattatatgaaagagcacttttggtaaatcccgaactatcagatgtgtgggctactttaggtcattgttatctgatgctggatgatctgcaaagagcttacaatgcctatcaacaggctctctaccacctcagtaatcccaacgtaccgaaattatggcatggaatcggcattctttatgacagatatggttcgctcgactatgccgaagaagcttttgccaaagttttggaattggaccctcattttgaaaaggcaaacgaaatttacttcagactaggtattatttataaacatcagggtaaatggtctcaagctttggaatgcttcagatacattctccctcaacctcctgctcccttgcaggagtgggacatatggtttcagttgggtagtgttttggagagtatgggagagtggcaaggtgcgaaggaagcctacgagcatgtcttggctcaaaatcaacatcatgccaaagtattacaacaattaggttgtctttacggtatgagtaacgtacaattttatgaccctcaaaaggcattggattatcttctaaagtcgttagaagcagatccctccgatgccactacatggtaccatctcggtagagtgcatatgattagaacagattatactgccgcatatgatgctttccaacaagctgttaatagagattcaagaaaccctatcttttggtgctcaatcggtgttttatattaccaaatttctcaatacagagacgccttagacgcgtacacaagagccataagattaaatccttatattagtgaagtttggtacgatctaggtactctttacgaaacttgtaacaaccaattatctgacgcccttgatgcgtataagcaagctgcaagactggacgtaaataatgttcacataagagaaagattagaagctttaacaaagcagttagaaaacccaggcaatataaacaaatcgaacggtgcgccaacgaatgcctctcctgccccacctcctgtgattttacaacctaccttacaacctaatgatcaaggaaatcctttgaacactagaatttcagcccaatctgccaatgctactgcttcaatggtacaacaacagcatcctgctcaacaaacgcctattaactcttctgcaacaatgtacagtaatggagcttcccctcaattacaagctcaagctcaagctcaagctcaagcacaagctcaagcacaagcacaagctcaagcacaagcacaagcacaagcgcaagcacaagcacaagcacaggcgcaagcacaggcacaagcacaagcacaagcacatgcacaagcgcaagcacaagcacaagcacaggcacaagcacaagcacaggcgcaggcacaacaacaacaacaacaacagcaacaacaacaacaacaacaacaacaacaacaacaacaacaacaacaacaacaacaacaacagcagcagcaattacagcccctaccaagacaacagctgcagcaaaagggagtttctgtgcaaatgttaaatcctcaacaagggcaaccatatatcacacagccaacagtcatacaagctcaccaactgcaaccattttctacacaagctatggaacatccgcaaagctctcaactgccacctcaacagcaacaactacaatctgttcaacatccacaacaacttcaaggccagcctcaagcccaagctccccaacctttaatccagcataacgtggaacagaacgttttacctcaaaagagatacatggaaggtgcaatccacactttagtagatgccgccgtatccagtagcacccacacagagaataacacaaagtctcctcgtcaaccaacccatgccattccaacgcaagctcccgcaacaggaataacgaacgctgaaccacaggtaaagaagcaaaagttgaactctccaaattcaaacatcaacaaattagtaaatactgctacttccattgaagaaaatgcaaaatctgaggtgagcaaccaatcgccagcagtagtggagtctaataccaataatacttcacaagaagaaaaacctgtaaaagcaaactcaataccttcagtaattggcgcacaggaacctccacaggaagctagtcctgctgaagaagctaccaaagcagcttctgtttctccttctacaaaaccgcttaatacggaaccagagtcatctagtgtccaaccaactgtatcatcagaaagttcaacaacaaaagcaaatgaccaaagcactgctgagaccatagaactttctactgctactgttcctgcagaagcaagccctgtagaagacgaagtaagacagcattctaaagaggaaaacggcacaactgaagcatctgcaccttctactgaagaggcggagccagcagcttccagagatgctgaaaaacaacaagatgaaaccgctgctacaacgataactgtaatcaaacctactttggaaacaatggaaacagtgaaagaggaggccaaaatgcgtgaggaagagcaaacatctcaagaaaaatccccacaggagaacacacttccaagagaaaatgtagtaaggcaagtggaagaagatgaaaactacgacgactaa

SEQ ID NO: 372 - protein, 966 aa, Saccharomyces cerevisiae
MNPGGEQTIMEQPAQQQQQQQQQQQQQQQQAAVPQQPLDPLTQSTAETWLSIASLAETLGDGDRAAMAYDATLQFNPSSAKALTSLAHLYRSRDMFQRAAELYERALLVNPELSDVWATLGHCYLMLDDLQRAYNAYQQALYHLSNPNVPKLWHGIGILYDRYGSLDYAEEAFAKVLELDPHFEKANEIYFRLGIIYKHQGKWSQALECFRYILPQPPAPLQEWDIWFQLGSVLESMGEWQGAKEAYEHVLAQNQHHAKVLQQLGCLYGMSNVQFYDPQKALDYLLKSLEADPSDATTWYHLGRVHMIRTDYTAAYDAFQQAVNRDSRNPIFWCSIGVLYYQISQYRDALDAYTRAIRLNPYISEVWYDLGTLYETCNNQLSDALDAYKQAARLDVNNVHIRERLEALTKQLENPGNINKSNGAPTNASPAPPPVILQPTLQPNDQGNPLNTRISAQSANATASMVQQQHPAQQTPINSSATMYSNGASPQLQAQAQAQAQAQAQAQAQAQAQAQAQAQAQAQAQAQAQAQAQAQAHAQAQAQAQAQAQAQAQAQAQQQQQQQQQQQQQQQQQQQQQQQQQQQQQQQLQPLPRQQLQQKGVSVQMLNPQQGQPYITQPTVIQAHQLQPFSTQAMEHPQSSQLPPQQQQLQSVQHPQQLQGQPQAQAPQPLIQHNVEQNVLPQKRYMEGAIHTLVDAAVSSSTHTENNTKSPRQPTHAIPTQAPATGITNAEPQVKKQKLNSPNSNINKLVNTATSIEENAKSEVSNQSPAVVESNTNNTSQEEKPVKANSIPSVIGAQEPPQEASPAEEATKAASVSPSTKPLNTEPESSSVQPTVSSESSTTKANDQSTAETIELSTATVPAEASPVEDEVRQHSKEENGTTEASAPSTEEAEPAASRDAEKQQDETAATTITVIKPTLETMETVKEEAKMREEEQTSQEKSPQENTLPRENVVRQVEEDENYDD

SEQ ID NO: 373 - DNA, 2097 bp, Saccharomyces cerevisiae
atggtggataaaaataggacgttgcatgaattatcttccaaaaatttcagcagaacgccgaatggactgatctttaccaatgatttaaagacagtatattccatttttctaatttgtttggatttgaaagagaaaaaacatagtagtgacactaagtctttcttattaactgcattcactaaacatttccacttcacttttacatatcaggaagctattaaagcaatgggacaattggaactaaaagtggatatgaacacaacttgtattaacgtttcatataatattaaacctagtttggcgcgccaccttcttacattatttatgtcttctaagctactacatacaccgcaggacagaactcgtggcgagccaaaagagaaagttcttttccaaccaacacctaagggagttgctgttttacaaaagtatgttagagatattgggttgaaaacaatgcctgatattcttttgtcatcgtttaactccatgaaacttttcacttttgagagaagctctgtcacggattcaatcatccatagtgattatttgatccatattcttttcattaaaatgatgggcgctaagccaaatgtttggtctccaacaaacgcagatgacccattaccttgcctatcttcgttgttggaatacactaataatgatgatacatttacttttgagaaatctaagccagaacaaggatggcaagctcagattggaaacatcgatataaatgacttagaaagggtatcgccattagctcatcgattctttacaaatccagattctgagtcgcacacgcaatactacgtttcgaatgcaggtattaggttgtttgaaaataagacgtttggcacttccaaaaaaatcgtgattaagtacacctttacaacaaaggctatatggcagtggataatggactgtactgatattatgcatgttaaagaagcggtctcgttggcagcgttatttttaaaaacggggttgattgtaccagttcttttacaaccatcacgcactgacaagaaaaagtttcaaattagcaggtcctctttttttaccttgtccaagcgtggttgggatttggtttcttggacaggttgtaagagcaataatattagagcaccaaatggtagcaccatagacctagatttcacattaaggggtcatatgactgttcgtgatgaaaaaaagacattggatgatagtgaaggtttttctcaagacatgcttatctcttcgagtaatttaaataaactggactatgtgctaactgatccaggtatgagatatttattcaggcgccatttagaaaaggaactttgtgtagaaaatttggatgtcttcattgagattaagaggtttttgaagaaaatgacaattctgaaaaaattgatagattctaagcattgtgataaaaaatctaataccagtacttcaaaaaacaatatcgtaaaaacgattgattcagctttaatgaaacaggccaatgagtgccttgaaatggcatatcacatttattcgtcctatatcatgataggatcaccatatcaattaaatatccatcataacttgcgtcagaatatttctgacatcatgttgcaccctcattctccattatcggaacactttcctactaatctatacgatccatcacctgcatccgcggaatcagcagcttcatcaattagctcaacggaggctgacacgttaggtgaaccacctgaagtgagtctaaaaccttcaaaaaatctttcaaatgaaaactgttcatttaagaagcaaggattcaaacatcagttaaaggaatataaacctgccccgttaactctggcagaaacgcattcgcctaatgcatcagtagaaaattcacatacaattgttcgttatggcatggacaacacccaaaatgataccaaatcggttgaatcatttccagcaactttgaaggtcctcaggaaattatatcccctcttcgagatcgttagcaatgaaatgtatagactgatgaataacgattcctttcaaaaatttacccagtcagacgtatacaaagatgctagcgctttaatagaaatccaagaaaagtgctaa

SEQ ID NO: 374 - protein, 698 aa, Saccharomyces cerevisiae [sequence omitted]

SEQ ID NO: 375 - DNA, 2154 bp, Saccharomyces cerevisiae
atggaacagacacaaacagcagagggcactgacttactaattggtgacgaaaagaccaacgatttaccttttgtgcagttatttctggaggaaataggatgcactcaatacctggatagctttattcagtgcaaccttgtcacagaagaagaaattaagtatctcgacaaggatatcctcattgctttgggtgtaaacaaaataggagacagactcaaaattttaaggaagtcaaaatcgttccagagagataaacggattgaacaggtgaatagattgaaaaacctgatggaaaaagtaagctctctatccactgctacgctatcgatgaattcagaattgattcctgaaaagcactgtgttatatttatcttaaacgatggttccgctaagaaagttaatgtaaatggttgctttaatgcagattctattaagaaaaggctaatcagaagattgccacatgaattattagccacaaactccaatggagaagtaactaaaatggtccaagattatgatgtgtttgtcttagattataccaagaacgtactgcatttgctatatgacgtggaattagtcactatttgccacgcaaatgatcgtgttgagaaaaataggctaatttttgtttccaaagaccaaacaccaagtgataaagctatatccacatccaaaaaactatatctaagaacgttgagtgcattgagccaggttgggccatcctcgtcaaatttgttggcacagaacaaggggatttcgcataacaatgctgaagggaaactccggatcgacaacacagaaaaggacagaattagacagatttttaatcagaggcctcctagcgaatttatttctaccaatttggccggatattttcctcatacagacatgaagcggttgcaaaagacgatgagagagtcatttcgccattcagcaaggctaagcattgctcaaagaagacctttaagtgcagaatcaaataatatcggtgacatactattgaaacactcaaacgctgttgatatggccctattacaaggattagatcagacaagattaagcagtaaacttgacacaactaaaattccgaagcttgcccataaaaggccagaagataatgatgccatatctaaccagttagaactattaagtgtagagtctggtgaagaagaagatcacgatttctttggggaggacagtgacattgtttcattaccgacgaaaattgccacgcccaagaattggttaaaaggtgcttgcattggatcaggcagttttgggagtgtttacttgggcatgaatgctcacactggtgaactaatggcagtaaagcaagtggagataaaaaataataacattggtgttcccacagacaacaataaacaagccaattctgatgagaataatgagcaggaggaacaacaagagaaaatagaagatgttggggcggtaagtcatccaaaaaccaatcaaaatattcacagaaagatggttgatgctttacagcatgaaatgaatttattgaaggagttacatcatgagaacattgttacttattatggtgcttctcaagaaggcggaaatttaaatatttttcttgaatacgttcctgggggttcggtttcctccatgctgaataattacggtccatttgaggaatcactgattactaatttcactaggcaaatactgattggggttgcgtatttgcataagaagaacattattcacagagatatcaagggtgcaaatattttgattgatatcaaaggttgcgtaaaaattactgattttggtatttcaaaaaaattatcacctttgaataaaaaacaaaataagagagcttctttgcaaggttccgtattctggatgtcaccagaggtggtcaaacagaccgctactactgctaaagcggatatatggtctacaggatgtgttgtcattgaaatgtttaccggtaagcatcctttcccagatttttctcaaatgcaagcgatcttcaaaataggcacaaacacgacccccgagataccttcctgggctacgtcagaaggaaagaatttcttaagaaaggcatttgagttggattatcaatacaggcctagtgcccttgaattgctgcagcatccatggctggatgcacacataatttga

SEQ ID NO: 376 - protein, 717 aa, Saccharomyces cerevisiae
MEQTQTAEGTDLLIGDEKTNDLPFVQLFLEEIGCTQYLDSFIQCNLVTEEEIKYLDKDILIALGVNKIGDRLKILRKSKSFQRDKRIEQVNRLKNLMEKVSSLSTATLSMNSELIPEKHCVIFILNDGSAKKVNVNGCFNADSIKKRLIRRLPHELLATNSNGEVTKMVQDYDVFVLDYTKNVLHLLYDVELVTICHANDRVEKNRLIFVSKDQTPSDKAISTSKKLYLRTLSALSQVGPSSSNLLAQNKGISHNNAEGKLRIDNTEKDRIRQIFNQRPPSEFISTNLAGYFPHTDMKRLQKTMRESFRHSARLSIAQRRPLSAESNNIGDILLKHSNAVDMALLQGLDQTRLSSKLDTTKIPKLAHKRPEDNDAISNQLELLSVESGEEEDHDFFGEDSDIVSLPTKIATPKNWLKGACIGSGSFGSVYLGMNAHTGELMAVKQVEIKNNNIGVPTDNNKQANSDENNEQEEQQEKIEDVGAVSHPKTNQNIHRKMVDALQHEMNLLKELHHENIVTYYGASQEGGNLNIFLEYVPGGSVSSMLNNYGPFEESLITNFTRQILIGVAYLHKKNIIHRDIKGANILIDIKGCVKITDFGISKKLSPLNKKQNKRASLQGSVFWMSPEVVKQTATTAKADIWSTGCVVIEMFTGKHPFPDFSQMQAIFKIGTNTTPEIPSWATSEGKNFLRKAFELDYQYRPSALELLQHPWLDAHII

SEQ ID NO: 377 - DNA, 2067 bp, Saccharomyces cerevisiae
atgaaagtccaaataaccaatagtagaacagaggaaatcttaaaagttcaagctaataatgaaaacgatgaagtcagtaaagctactccgggcgaagttgaagaatcgctaaggttaatcggcgatctaaaattctttttagccacagcgccggtaaattggcaagaaaaccaaattataaggcgatactatctgaatagtggacaaggctttgtctcttgtgtattttggaacaatctatactatattacaggtactgatattgtcaaatgttgtctttacagaatgcaaaagtttgggagagaagtagttcaaaagaaaaaatttgaagagggtattttttcagatttaagaaatctcaaatgtggtatagatgcaactttagaacaaccaaagtccgaatttttgtcgtttctattcagaaatatgtgtctgaaaacccaaaaaaagcagaaagtatttttttggttcagtgtagcacatgataagttgtttgcggatgcgttggaaagagatttaaaaagagaaagtttgaatcagccttcaacgactaagcccgttaatgagcccgccttatctttttcatatgattcctcatctgataagcctctctacgatcagttacttcaacatttagattctagaagaccatctagtacaacaaaatcagataattcgcctccaaaattagaaagcgagaattttaaggataatgagttggtaacagtaactaatcagccgcttttaggcgttggcctcatggatgacgatgcgccagaatccccctctcaaattaatgattttattcctcagaaattgattatagaacccaatactctcgaattgaatggtctcacagaagaaacgcctcatgacttacccaagaataccgctaagggcagagacgaagaagattttcctctcgactattttcctgtatctgttgaataccctacggaggaaaatgcgtttgatccgttccctccacaggcttttacgccagctgccccttccatgcctatttcctatgataacgtgaatgaaagggattctatgcccgttaattctcttcttaatagatacccctatcagttatcagtggcacccactttcccagtgccaccatcatcatcgaggcaacattttatgacaaatcgggatttttattcatctaacaataacaaggaaaaattggtatctcctagcgaccctaccagctacatgaagtatgacgaaccagttatggattttgatgaatctcggccaaatgaaaactgtacaaatgcaaaatctcacaactctggccagcaaactaaacaacaccaattatattctaacaacttccagcaatcttacccaaacggaatggttccaggatactacccaaaaatgccgtataatcccatggggggggatcctctactcgatcaagccttttatggcgcggacgattttttctttccaccagaaggatgtgataacaatatgctgtatccacaaactgcaacttcatggaatgttttgccccctcaagctatgcaaccagctccaacctatgttgggagaccatacacaccgaattatagatcgacaccaggttccgcgatgttcccatacatgcaaagttcaaattccatgcagtggaacactgctgtttcaccttatagttcgagagcaccatctacaactgctaaaaactatcctcctagcacattttattctcaaaatataaatcaatacccacggcgaagaactgtgggaatgaagtcttcacaaggaaatgttccaacaggtaataaacaatctgtgggcaagtctgcaaaaatttcaaagcctctacatattaagacaagtgcttatcagaagcaatacaaaatcaacttggaaacgaaagccaggccaagtgctggtgacgaagattctgctcatcctgataagaacaaagaaatttcgatgcctactccggattccaatactttggtggtccagtcagaagaaggtggagctcattcacttgaggtagataccaatcgaaggtccgataaaaaccttccagatgcaacctga

SEQ ID NO: 378 - protein, 688 aa, Saccharomyces cerevisiae
MKVQITNSRTEEILKVQANNENDEVSKATPGEVEESLRLIGDLKFFLATAPVNWQENQIIRRYYLNSGQGFVSCVFWNNLYYITGTDIVKCCLYRMQKFGREVVQKKKFEEGIFSDLRNLKCGIDATLEQPKSEFLSFLFRNMCLKTQKKQKVFFWFSVAHDKLFADALERDLKRESLNQPSTTKPVNEPALSFSYDSSSDKPLYDQLLQHLDSRRPSSTTKSDNSPPKLESENFKDNELVTVTNQPLLGVGLMDDDAPESPSQINDFIPQKLIIEPNTLELNGLTEETPHDLPKNTAKGRDEEDFPLDYFPVSVEYPTEENAFDPFPPQAFTPAAPSMPISYDNVNERDSMPVNSLLNRYPYQLSVAPTFPVPPSSSRQHFMTNRDFYSSNNNKEKLVSPSDPTSYMKYDEPVMDFDESRPNENCTNAKSHNSGQQTKQHQLYSNNFQQSYPNGMVPGYYPKMPYNPMGGDPLLDQAFYGADDFFFPPEGCDNNMLYPQTATSWNVLPPQAMQPAPTYVGRPYTPNYRSTPGSAMFPYMQSSNSMQWNTAVSPYSSRAPSTTAKNYPPSTFYSQNINQYPRRRTVGMKSSQGNVPTGNKQSVGKSAKISKPLHIKTSAYQKQYKINLETKARPSAGDEDSAHPDKNKEISMPTPDSNTLVVQSEEGGAHSLEVDTNRRSDKNLPDAT

SEQ ID NO: 379 - DNA, 2820 bp, Saccharomyces cerevisiae
atgagcaatgatccatctgctgtatcggaactaccagacaaggacagtcttgataacggtatcagcaatgacaatgaaagggccatgggcggcaatggcgatggcggcgatggattacgattaccaaggaccactggaactttgaacgtcaatgccttacaaaaaggcactaatgctgcccatgaagctggtggatacaaatccatggatcctgcgaagaacgcggagacaaccaatgatgatgacaataatgtcgtttcactagatgatcctattcaatttacccgagtatcttcctcctctgtcatcagtggaatgtcttcatccatgagtcctcattctaacatcgatgaaaccaaatctctagaagcagtcactccaaacataaataccagcaatataaccccggatcattctgctgacaacacattttctaccataaatgcgtccgagtcagatcaccagtttaatgacactttactatcaaaactgtcgttaacagattctacagaaactatagaaaataacgcgacagtgaagcaccagcagccagttgcatcttccacagtaaactcgaataagagctccactgatatacgaagggctacaccagtgtccactcccgttatctctaaaccatcgatgacaaccacgccaagacagatcaattcagcttcccattcgctttcgaaccctaagcataagcaacataaaccaaaagttaaaccgtccaagcctgaagcaaaaagtaaaccggtttctgtgaaaaaaagctttccttcgaaaaatcctttaaaaaactcctctccacctaaaaagcaaacagaaaaatcgtattattcttcctcttcgaaaaaaaggaaaagcggttcaaatagtggtacactaagaatgaaagatgtctttacgtcctttgtacagaatataaagagaaattctcaggatgataaaagggcctcatcgtcgtccaataattcttcctcatcttctataaccaccgctttgaggatatctacgccatacaatgccaagcatatccaccatgtgggcgtggactccaagactggtgagtacacaggtttgccggaggaatgggaaaaattgttgacttctagtggtatttccaaaagagaacaacagcaaaacatgcaagcagtcatggatattgtcaaattctatcaggatgtcacggaaacaaacggtgaagataaaatgttcaagactttcaacacaaccacaggattgccgggaagtcctcaagtttcaacaccgcctgcaaactcattcaataaatttcctccgtcgacaagtgattcgcacaattacggttccagaacaggtacaccaatgtccaatcacgtcatgtctccaaccttaaatacagattctagttcagcaaacgggaaattcataccaagtagaccggctcctaagcccccatcttctgcgtccgcttcagctccaattataaaatcacccgtcatgaattctgccgccaatgtttcgcccttgaagcagactcatgcacctacaactccgaacaggaccagcccaaacaggtcctcaatatcaagaaatgccactttaaaaaaagaggagcagccactaccaccaatacctccaaccaaatccaaaacgtctccaatcatctccacagctcacacaccacagcaagttgctcaatcgccaaaagcgccggcgcaagagacggtaacgacacctacttcgaagccagctcaagcaagaagcttgtctaaagaattaaatgagaaaaagagagaggaaagggaaagacgtaaaaaacaactatatgccaaattgaacgaaatttgctcagacggtgacccaagtacaaaatatgccaatttagtaaaaattggtcaaggtgcatcaggtggtgtttatactgcttatgaaataggtacgaatgtctcagtggccattaagcaaatgaatctcgaaaagcaaccaaaaaaggagctaatcatcaatgagattctggtcatgaagggtagcaaacaccctaatatagttaatttcattgattcttacgttttaaaaggcgacctttgggtcattatggaatacatggaaggtggctccttaactgatgtggtcacccattgtattttgacagaaggtcaaattggtgccgtttgtagagaaactttgagtgggttggaatttttacattctaaaggtgttcttcacagagatatcaaatccgataacatcctattgtccatggaaggggatattaagttaacggatttcggtttttgcgctcaaatcaatgaattgaacttgaaaagaactactatggtgggaacgccttattggatggcgcctgaagtggtttctaggaaagaatatggcccaaaagtagatatctggtcgttgggtatcatgatcattgaaatgatcgagggggagcctccatatttaaatgaaaccccgctaagagcactgtatttaattgctacaaatggtacacccaagttaaaggaacccgagaatctatcgtcaagcttgaaaaaattccttgattggtgtttatgtgtggagcccgaagatagagcaagcgctacggaattgcttcatgatgaatatatcacggagatagctgaagccaattcctcattggccccgctagtcaagttagcaagattgaagaaagtagctgagaacatggatgctgatgaagataatgacgacgataacgacaacgagcatattaataagacaaacaattgtgacgacaataacgatagcaaagaaaccgtaaatttggacgtaactgaagatgataaacaaaagtaa

SEQ ID NO: 380 - protein, 939 aa, Saccharomyces cerevisiae
MSNDPSAVSELPDKDSLDNGISNDNERAMGGNGDGGDGLRLPRTTGTLNVNALQKGTNAAHEAGGYKSMDPAKNAETTNDDDNNVVSLDDPIQFTRVSSSSVISGMSSSMSPHSNIDETKSLEAVTPNINTSNITPDHSADNTFSTINASESDHQFNDTLLSKLSLTDSTETIENNATVKHQQPVASSTVNSNKSSTDIRRATPVSTPVISKPSMTTTPRQINSASHSLSNPKHKQHKPKVKPSKPEAKSKPVSVKKSFPSKNPLKNSSPPKKQTEKSYYSSSSKKRKSGSNSGTLRMKDVFTSFVQNIKRNSQDDKRASSSSNNSSSSSITTALRISTPYNAKHIHHVGVDSKTGEYTGLPEEWEKLLTSSGISKREQQQNMQAVMDIVKFYQDVTETNGEDKMFKTFNTTTGLPGSPQVSTPPANSFNKFPPSTSDSHNYGSRTGTPMSNHVMSPTLNTDSSSANGKFIPSRPAPKPPSSASASAPIIKSPVMNSAANVSPLKQTHAPTTPNRTSPNRSSISRNATLKKEEQPLPPIPPTKSKTSPIISTAHTPQQVAQSPKAPAQETVTTPTSKPAQARSLSKELNEKKREERERRKKQLYAKLNEICSDGDPSTKYANLVKIGQGASGGVYTAYEIGTNVSVAIKQMNLEKQPKKELIINEILVMKGSKHPNIVNFIDSYVLKGDLWVIMEYMEGGSLTDVVTHCILTEGQIGAVCRETLSGLEFLHSKGVLHRDIKSDNILLSMEGDIKLTDFGFCAQINELNLKRTTMVGTPYWMAPEVVSRKEYGPKVDIWSLGIMIIEMIEGEPPYLNETPLRALYLIATNGTPKLKEPENLSSSLKKFLDWCLCVEPEDRASATELLHDEYITEIAEANSSLAPLVKLARLKKVAENMDADEDNDDDNDNEHINKTNNCDDNNDSKETVNLDVTEDDKQK

SEQ ID NO: 381 - DNA, 1041 bp, Saccharomyces cerevisiae
atggaggacggtaaacaggccatcaatgagggatcaaacgatgcttcgccggatctggacgtgaatggcacaatattgatgaataatgaagacttttcccagtggtcggttgatgatgtgataacttggtgtatatccacgctggaggtggaagaaaccgatccattatgtcagagactgcgagaaaatgatattgtaggagatcttttgccggaattgtgcttgcaagattgccaggacttgtgtgacggtgatttgaataaggccataaaattcaagatactgatcaataagatgagagacagcaagttggagtggaaggacgacaagactcaagaggacatgataacggtactgaaaaacttgtacactactacatctgcgaaattgcaagaatttcaatcgcagtacacaaggctgaggatggatgtcttggacgtaatgaagaccagctcaagctcttctccgattaacacacatggagtgtccactacggtaccttcttcaaacaacacaattatacccagtagtgacggtgtgtctctttcacaaacagactatttcgacacagttcataaccgacaatcaccgtcaaggagagaatccccggtaacggtatttaggcaacccagtctttcccactcaaaatctttgcacaaggatagcaaaaacaaagtaccccaaatatctacaaaccaatctcacccatctgccgtttcaacagcgaacacaccggggccatcacctaacgaggcgttaaaacagttgcgtgcatctaaagaagactcctgcgaacggatcttgaaaaacgcaatgaaaagacataacttagcagatcaggattggagacaatatgtcttggtcatttgctatggggatcaagagaggctgttagaattgaacgaaaagcctgtgatcatattcaagaacttaaagcaacagggtttgcaccccgccattatgttaagaagaagaggtgatttcgaagaagtagcaatgatgaacggaagtgacaatgtcacccccggtggaagactctaa

SEQ ID NO: 382 - protein, 346 aa, Saccharomyces cerevisiae
MEDGKQAINEGSNDASPDLDVNGTILMNNEDFSQWSVDDVITWCISTLEVEETDPLCQRLRENDIVGDLLPELCLQDCQDLCDGDLNKAIKFKILINKMRDSKLEWKDDKTQEDMITVLKNLYTTTSAKLQEFQSQYTRLRMDVLDVMKTSSSSSPINTHGVSTTVPSSNNTIIPSSDGVSLSQTDYFDTVHNRQSPSRRESPVTVFRQPSLSHSKSLHKDSKNKVPQISTNQSHPSAVSTANTPGPSPNEALKQLRASKEDSCERILKNAMKRHNLADQDWRQYVLVICYGDQERLLELNEKPVIIFKNLKQQGLHPAIMLRRRGDFEEVAMMNGSDNVTPGGRL

SEQ ID NO: 383 - DNA, 1548 bp, Saccharomyces cerevisiae
atgtttcaacgaaagactttacagagaaggaacttgaaagggctcaatcttaacctgcacccagatgtgggcaataatggccaattgcaggaaaagacagagactcaccagggacaatctcgaatagaaggccacgtgatgtctaacattaatgcaatacagaataatagcaacctgtttttgcgaagaggcataaaaaaaaaactgacgttggatgcgtttggtgatgaccaagctatatcgaaaccaaacactgtggtaatacagcaaccgcaaaatgaacctgttttagttctgtcttctctatcacaatccccgtgtgtatcatcatcatcatctttgtccacgccatgcattatagatgcgtacagtaataatttcggattatcgccatcatccacgaattctactccctctacgattcagggattgtccaatattgcaacaccagttgaaaacgaacattcgatatcactaccacctttggaggaaagcctatcgccagccgcagcagatctgaaagatacgttgtcgggaacttcaaatggtaattatatacaactccaggacttggttcagttggggaaaattggtgctggaaattctggaactgtggtgaaggcactacatgttcctgattccaaaatagttgccaaaaaaaccattcctgtggaacagaataacagtacaatcatcaaccaattagttagggaattatctatcgtcaaaaacgttaagccccatgaaaacattatcaccttctatggagcttattataaccagcatataaataatgaaatcataattttaatggaatactctgattgtggttctttagataaaatactgtccgtttataaaaggtttgttcaaagagggactgtttcgagtaagaaaacctggttcaacgaattaacaatatcaaaaatagcgtatggcgtactaaatggcttggatcatttgtaccgacaatataagatcattcatcgtgatatcaagccttccaatgttctgattaatagtaaggggcagattaagttatgtgattttggagtttccaaaaaactaataaattctatcgctgatacatttgttggaacgtccacttatatgtcaccagagaggatacaaggaaacgtttattctatcaaaggggacgtttggtcattgggcttaatgatcatcgagctggtaactggagagtttcccctaggtgggcataacgatacacctgatggcatattggatttgctgcaacgtattgtcaacgagccttcaccaagattacccaaagaccgtatctattccaaggaaatgacagattttgtcaataggtgttgtattaagaatgaaagggaaaggtcatcgattcatgaattgctacatcatgatcttataatgaaatacgtatcaccgtctaaagatgataaatttagacattggtgtagaaaaataaaatctaaaataaaggaagacaagagaattaaaagagaagccttggaccgtgccaagttagaaaagaaacaatcggaaagatcaacccattga

SEQ ID NO: 384 - protein, 515 aa, Saccharomyces cerevisiae
MFQRKTLQRRNLKGLNLNLHPDVGNNGQLQEKTETHQGQSRIEGHVMSNINAIQNNSNLFLRRGIKKKLTLDAFGDDQAISKPNTVVIQQPQNEPVLVLSSLSQSPCVSSSSSLSTPCIIDAYSNNFGLSPSSTNSTPSTIQGLSNIATPVENEHSISLPPLEESLSPAAADLKDTLSGTSNGNYIQLQDLVQLGKIGAGNSGTVVKALHVPDSKIVAKKTIPVEQNNSTIINQLVRELSIVKNVKPHENIITFYGAYYNQHINNEIIILMEYSDCGSLDKILSVYKRFVQRGTVSSKKTWFNELTISKIAYGVLNGLDHLYRQYKIIHRDIKPSNVLINSKGQIKLCDFGVSKKLINSIADTFVGTSTYMSPERIQGNVYSIKGDVWSLGLMIIELVTGEFPLGGHNDTPDGILDLLQRIVNEPSPRLPKDRIYSKEMTDFVNRCCIKNERERSSIHELLHHDLIMKYVSPSKDDKFRHWCRKIKSKIKEDKRIKREALDRAKLEKKQSERSTH

SEQ ID NO: 385 - DNA, 891 bp, Saccharomyces cerevisiae
atgtctgcaaacggcaagatctctgttcccgaggcggtggtcaattggctgttcaaagtcattcaacccatttataacgacggaagaacaactttccacgattctttagcgctgctggacaattttcacagtttaaggccaagaacaagggtatttacgcactctgacggcactccacaactactgttgtccatatatggtaccattagtactggtgaggatggttcatctcctcacagtattcctgtgatcatgtgggtacccagtatgtacccggtaaaacctccctttataagtataaacttggaaaatttcgacatgaacaccatcagtagttccttgcccattcaagaatacatcgactccaatgggtggattgcgctgcccatactccactgctgggatcctgccgcgatgaaccttataatggtcgtacaagaattaatgagtctcttacacgagccgccacaagatcaggcgcccagtctaccccctaagcccaatacgcagctccagcaggagcagaatactcccccactgcccccaaagcccaagtctccacacctaaaaccgccattgcctccacctccaccacctcaaccggcatctaacgcactcgaccttatggacatggacaacacggatatctccccaaccaaccatcatgaaatgctacaaaatctacaaaccgtagtcaatgagttatacagagaggatgtggactatgtagcggacaagatactgacgagacagaccgtcatgcaagaatcaattgccagattccatgaaataatcgccatcgacaagaaccatttacgagccgttgagcaggctattgagcagaccatgcactcgctaaacgcacagatagacgtcctgaaccgcaaatag

SEQ ID NO: 386 - protein, 296 aa, Saccharomyces cerevisiae
MSANGKISVPEAVVNWLFKVIQPIYNDGRTTFHDSLALLDNFHSLRPRTRVFTHSDGTPQLLLSIYGTISTGEDGSSPHSIPVIMWVPSMYPVKPPFISINLENFDMNTISSSLPIQEYIDSNGWIALPILHCWDPAAMNLIMVVQELMSLLHEPPQDQAPSLPPKPNTQLQQEQNTPPLPPKPKSPHLKPPLPPPPPPQPASNALDLMDMDNTDISPTNHHEMLQNLQTVVNELYREDVDYVADKILTRQTVMQESIARFHEIIAIDKNHLRAVEQAIEQTMHSLNAQIDVLNRK

SEQ ID NO: 387 - DNA, 2157 bp, Saccharomyces cerevisiae
atgggatccgaccggtcgtgtgttttgtctgtgtttcagaccatcctcaagctcgtcatcttcgtggcgatttttggggctgccatatcatcacgtttgtttgcagtcatcaaatttgagtctattatccatgaattcgacccctggttcaattatagggctaccaaatatctcgtcaacaattcgttttacaagtttttgaactggtttgacgaccgtacctggtaccccctcggaagggttactggagggactttatatcctggtttgatgacgactagtgcgttcatctggcacgccctgcgcaactggttgggcttgcccattgacatcagaaacgtttgtgtgctatttgcgccactattttctggggtcaccgcctgggcgacttacgaatttacgaaagagattaaagatgccagcgctgggcttttggctgctggttttatagccattgtccccggttatatatctagatcagtggcggggtcctacgataatgaggccattgccattacactattaatggtcactttcatgttttggattaaggcccaaaagactggctctatcatgcacgcaacgtgtgcagctttattctacttctacatggtgtcggcttggggtggatacgtgttcatcaccaacttgatcccactccatgtctttttgctgattttgatgggcagatattcgtccaaactgtattctgcctacaccacttggtacgctattggaactgttgcatccatgcagatcccatttgtcggtttcctacctatcaggtctaacgaccacatggccgcattgggtgttttcggtttgattcagattgtcgccttcggtgacttcgtgaagggccaaatcagcacagctaagtttaaagtcatcatgatggtttctctgtttttgatcttggtccttggtgtggtcggactttctgccttgacctatatggggttgattgccccttggactggtagattttattcgttatgggataccaactacgcaaagatccacattcctatcattgcctccgtttccgaacatcaacccgtttcgtggcccgctttcttctttgatacccactttttgatctggctattccccgccggtgtattcctactattcctcgacttgaaagacgagcacgtttttgtcatcgcttactccgttctgtgttcgtactttgccggtgttatggttagattgatgttgactttgacaccagtcatctgtgtgtccgccgccgtcgcattgtccaagatatttgacatctacctggatttcaagacaagtgaccgcaaatacgccatcaaacctgcggcactactggccaaattgattgtttccggatcattcatcttttatttgtatcttttcgtcttccattctacttgggtaacaagaactgcatactcttctccttctgttgttttgccatcacaaaccccagatggtaaattggcgttgatcgacgacttcagggaagcgtactattggttaagaatgaactctgatgaggacagtaaggttgcagcgtggtgggattacggttaccaaattggtggcatggcagacagaaccactttagtcgataacaacacgtggaacaatactcacatcgccatcgttggtaaagccatggcttcccctgaagagaaatcttacgaaattctaaaagagcatgatgtcgattatgtcttggtcatctttggtggtctaattgggtttggtggtgatgacatcaacaaattcttgtggatgatcagaattagcgagggaatctggccagaagagataaaagagcgtgatttctataccgcagagggagaatacagagtagatgcaagggcttctgagaccatgaggaactcgctactttacaagatgtcctacaaagatttcccacaattattcaatggtggccaagccactgacagagtgcgtcaacaaatgatcacaccattagacgtcccaccattagactacttcgacgaagtttttacttccgaaaactggatggttagaatatatcaattgaagaaggatgatgcccaaggtagaactttgagggacgttggtgagttaaccaggtcttctacgaaaaccagaaggtccataaagagacctgaattaggcttgagagtctaa

SEQ ID NO: 388 - protein, 718 aa, Saccharomyces cerevisiae
MGSDRSCVLSVFQTILKLVIFVAIFGAAISSRLFAVIKFESIIHEFDPWFNYRATKYLVNNSFYKFLNWFDDRTWYPLGRVTGGTLYPGLMTTSAFIWHALRNWLGLPIDIRNVCVLFAPLFSGVTAWATYEFTKEIKDASAGLLAAGFIAIVPGYISRSVAGSYDNEAIAITLLMVTFMFWIKAQKTGSIMHATCAALFYFYMVSAWGGYVFITNLIPLHVFLLILMGRYSSKLYSAYTTWYAIGTVASMQIPFVGFLPIRSNDHMAALGVFGLIQIVAFGDFVKGQISTAKFKVIMMVSLFLILVLGVVGLSALTYMGLIAPWTGRFYSLWDTNYAKIHIPIIASVSEHQPVSWPAFFFDTHFLIWLFPAGVFLLFLDLKDEHVFVIAYSVLCSYFAGVMVRLMLTLTPVICVSAAVALSKIFDIYLDFKTSDRKYAIKPAALLAKLIVSGSFIFYLYLFVFHSTWVTRTAYSSPSVVLPSQTPDGKLALIDDFREAYYWLRMNSDEDSKVAAWWDYGYQIGGMADRTTLVDNNTWNNTHIAIVGKAMASPEEKSYEILKEHDVDYVLVIFGGLIGFGGDDINKFLWMIRISEGIWPEEIKERDFYTAEGEYRVDARASETMRNSLLYKMSYKDFPQLFNGGQATDRVRQQMITPLDVPPLDYFDEVFTSENWMVRIYQLKKDDAQGRTLRDVGELTRSSTKTRRSIKRPELGLRV

SEQ ID NO: 389 - DNA, 5703 bp, Saccharomyces cerevisiae
atgagatttaccagaggattgaaagcctcttcatctttaagagcgaaagctattggaagactaactaaactttcgacgggtgcaccaaatgatcaaaacagtaatggtacaacattagatttgataactcatacattgcctattttttattccacaaatacgtcaaagatatatactataccacttacattgagtgaatgggaagtactaacttcgctttgtgttgcaatccctaccacgctcgatctggtagagacaatgcttaaagaaataattgcgccttattttctggaaactccaagacaaagaatttcagatgttctgtcctcgaaattcaagttggaacagatgagaaatccgattgaattgctaactttccagctgactaagtttatgattcaagcttgtgaacagtatcccgttctttatgaaaatataggcggcatcatttcaacttattttgagcgtgtattaaagatttttactattaaacaatctggtctactatcattagtgggctttattaatgcatttatccagtttcccaactctacagagcttactaaattcacctggaaaaagttagcgaaacttgtgcttcgtggatcatttctaaacgaagttgataagattttgaattcctcagcaacgtttaccaatgattcaatcgtccagtattacgatgctggaaatgagctatccagtgcctacttattggaattaatatctcgcttgcaagtttcgctaatatctcatctgttaaacacttcacatgtcggcgccaacttgagtgagttcttactaaatcaacaataccaattttacaaatttgatcaagaagtagccgatgaaaacgatgatacgaagtgtattgatgacttttttttcaacgtaagaagcaataaacagttttttacagacatgtgtaaaatttccctgcaattttgttctgagtcacatattctcgacctatctacagacaaccgtgcaagattttcttttgatactcgagcccactacctacaaacgctatgtttaattccgtttatagaagatacagaaagcgagctttttgaaagttttacaaacgttgtttctgaatctattgataaatttttcttatctgatgtcgttacaccatctttgataaaagcaattgtagcttctgcctcattactgaattttttcacggaaaaattgtcattaactctgattcgtatgtttcctttattggtagcgtctccacatatcacgactgaaacagttaatgatgttgcaaaaatattcaccacagggttataccctctaaatgaagatgcaattgtgagtacaatttattccatgaacaacttattagctgtttccgaggacggatcgcccgtcccggtgctccgtgagcgccaattaacaataacatctggaaaaaatattgagaaagactactttcccttgcgaaattcatctgccagtttggatggcactggtgctctgctcggaaatacaactgtgggccaactttcctcccatgatgtcaatagtggagctactatgacataccatgcctctttgatatctaattgtgtggctgcaacgactacaatcgcctcatactataacacccaaagcataacagctttgactatctctattcttacgcaaaaagttaattctatgtcaaaggaattagacggtgttattttgaattctttggcaagactggctccgaatacttcactgacagaattttcgcttttactaaagttcttcaaatcgagaactgttattgcaacaaaaattgatgatagcgcactattgaaaaatattattaaagcgaaatgtgtgatatcaaaagaattgttggccaggcatttttcaagtgacttatatttcatgtatcttcatgatctattggactcaatcattgccagtggggaagtagaacgattggaacatcacagacctcaaacggagatttcccgtgttgctgatcaaatcgctacctacttagagcccctcgccgctctactacctgttccaggcgatacgccattggacatcaataaggatgaagtcactacaaacaagtttaggaacgcctggtttaattttgtcatccatgggtaccacttgggcgggcctattgtcaaacgaaatttttctttcttattaactattgcctataattcaccaccgctggcttctgaatttcctgctaataacaaggagctttcattggaaatgaatacaattttgcgccgcggttcatctaacgaaaatatcaaacaacaaaaacagcagataaccgaatatttcaataccaatattgttcagtacagaacaacttcatcgtctaaaatcatgtttttagcggctgccgttcttctagaaacgataagatgcgaggcaggtgattgttcgaagactctactgtacttctcagacccctccattctttccggttcaattgagaagtgtattgcagttttgtcggtttccatgattagaaaatatgctaggttgattcaaaagggtaacgatgccatattcaactccaaaatgattgctcaacaacttaataacttgctactttgcctttctcatagggaaccaactttgcaggatgccgcttttcatgcctgtgaaatatttatcagatctattccatcatcgttatgtcatcatttgtctctctacaccttattagatatgttaacagccctatttgatagtatcttggactcagaggcgcataaatttgaaccacggtatgaatttaaattaaaacattctaagacaacaatattggttccaagctcatcgtcctggcgcgctacgacactatcaagattgcacaagtcagctaaagaatgggtaagaattctattgaatagaagcaaccaggatactaagattttgttgcaatcatacatatcagatctcggtgagtacagcaggctaaattctgttgaatttggtgtctcatttgccatggatatggctggtttgattttacctgcagataaggaattatcaaggcttacttattatggtccagagaaacctaacacgatttctggatttatatctttacattcttggaggtcaaaatatcttttcgataccgctattacatcatcaccagaggatatcaaaaggcaaataggtatttccactcaaaacataagaaaaaatttgaccttaggaaataagattataactaaagacgtaactgattttcttgatatggctaccgcgttgttaattcttggcaatggtgcaccagcgtcattgatatatgatattgtgcacatcccgttcgaagtcttcacctctgcatctttaaagattgctacaaacgtatggttaacaatcataactgagaagcccgaagttgcacatttgcttttagttgaagtatgctattgctggatgcgctccattgatgacaatattggtctctattctcgcgatcatgacttaaagggcgaagaataccaaaaaatggaatattccccttacgacaaagcaggtatcaacagagatgcaaaaaatgcatcccaagctatgcaaccacatcttcatgttattaaattttttgcttcccatttcgagggcacactatttcaaagtgactttttattgaaaattttcacgaaatgtgcgctttatggtatcaagaatctgtataaggcttcactacacccgttcgctagaatgattcgccacgaattattgttattcgcgactctcgtactaaacgcaagttataagcagggatccaagtatatgggccgtttgtcgcaagaaatcacaaacggtgccctaagttggtttaaaagaccagtagcgtggccattcggctcaaatgagctgaaaatcaaagcagatttatctgttactagggaccttttccttcagctcaacaaattaagctcgctaatgtcacgtcattgcgggaaagattacaagatcctgaactatttcttggcaagcgaaatccagcagattcaaacctggcttactccgactgagaagattgaaggagccgacagcaacgagcttacaagcgatatcgttgaagctacctttgctaaagatccaacattagcaataaatctcttacaacgatgttatagcaagaaagctgaggatgttttagtgggcttagttgcaaaacatgctttaatgtgtgtggggtccccaagtgctcttgacctgttcataaaaggaagccacctgagcagtaagaaagacctacacgcaaccttatactgggcgccagtgagcccgttaaaatctatcaaccttttccttcccgaatggcaaggtaattcttttatcttacaattcagcatatattcgttggaatcacaagatgtgaacttggcattcttctatgttcctcaaatcgtacaatgtttgagatacgataaaaccggatatgtcgaaagattgattttggatactgcgaaaattagtgtgttattttctcatcaaataatctggaatatgcttgcaaactgctacaaggatgatgaaggtatacaagaagatgaaatcaaaccaactctagatcgtattagggagcgtatggtttcaagtttcagccaatctcatcgcgatttttacgaacgtgaatttgaattcttcgacgaagtaactggcatatctggtaagttgaaaccatacataaaaaaaagtaaggctgaaaagaaacataagatcgatgaagaaatgagcaaaattgaggtgaaacctgatgtttatttaccttctaatcctgacggtgtagttattgatattgatcggaagagtggtaagccacttcaatctcacgcaaaggcgccttttatggcgacctttaaaataaagaaagacgtaaaagatcctttgacaggtaaaaacaaggaagttgaaaaatggcaagctgctatcttcaaagtcggtgatgactgtaggcaagatgttctagcgttacaattgatctcgctatttagaaccatttggtctagtattggcttggatgtctacgtttttccctacagagttactgcgacggcaccgggttgtggtgtcatcgatgtgctacccaattcggtatcccgtgatatgttaggacgtgaagctgttaatggattatatgaatatttcactagtaaatttggtaatgaatctactatcgaatttcaaaacgcacgaaacaactttgttaaatccttagcgggatatagcgtaatttcgtatttgttgcaattcaaggatagacataatggtaacattatgtacgatgatcaaggacattgtctacatatcgattttgggtttatttttgatattgtcccaggtggtatcaagtttgaagcagtaccattcaagctgacgaaagaaatggttaaagtgatgggaggttcgccccagaccccagcgtatctggactttgaagaactttgtatcaaggcatatctagccgcccgtccgcacgtggaggccataattgagtgtgtaaatcctatgttaggaagcggtctcccctgctttaagggtcacaagacaattaggaatctaagagcaagatttcaacctcaaaaaaccgatcacgaagctgcactatatatgaaggcgctaatccgtaaaagttatgaaagtatattcactaaaggttatgatgaattccaaaggctcacaaatggcattccgtactga

SEQ ID NO: 390 - protein, 1900 aa, Saccharomyces cerevisiae
MRFTRGLKASSSLRAKAIGRLTKLSTGAPNDQNSNGTTLDLITHTLPIFYSTNTSKIYTIPLTLSEWEVLTSLCVAIPTTLDLVETMLKEIIAPYFLETPRQRISDVLSSKFKLEQMRNPIELLTFQLTKFMIQACEQYPVLYENIGGIISTYFERVLKIFTIKQSGLLSLVGFINAFIQFPNSTELTKFTWKKLAKLVLRGSFLNEVDKILNSSATFTNDSIVQYYDAGNELSSAYLLELISRLQVSLISHLLNTSHVGANLSEFLLNQQYQFYKFDQEVADENDDTKCIDDFFFNVRSNKQFFTDMCKISLQFCSESHILDLSTDNRARFSFDTRAHYLQTLCLIPFIEDTESELFESFTNVVSESIDKFFLSDVVTPSLIKAIVASASLLNFFTEKLSLTLIRMFPLLVASPHITTETVNDVAKIFTTGLYPLNEDAIVSTIYSMNNLLAVSEDGSPVPVLRERQLTITSGKNIEKDYFPLRNSSASLDGTGALLGNTTVGQLSSHDVNSGATMTYHASLISNCVAATTTIASYYNTQSITALTISILTQKVNSMSKELDGVILNSLARLAPNTSLTEFSLLLKFFKSRTVIATKIDDSALLKNIIKAKCVISKELLARHFSSDLYFMYLHDLLDSIIASGEVERLEHHRPQTEISRVADQIATYLEPLAALLPVPGDTPLDINKDEVTTNKFRNAWFNFVIHGYHLGGPIVKRNFSFLLTIAYNSPPLASEFPANNKELSLEMNTILRRGSSNENIKQQKQQITEYFNTNIVQYRTTSSSKIMFLAAAVLLETIRCEAGDCSKTLLYFSDPSILSGSIEKCIAVLSVSMIRKYARLIQKGNDAIFNSKMIAQQLNNLLLCLSHREPTLQDAAFHACEIFIRSIPSSLCHHLSLYTLLDMLTALFDSILDSEAHKFEPRYEFKLKHSKTTILVPSSSSWRATTLSRLHKSAKEWVRILLNRSNQDTKILLQSYISDLGEYSRLNSVEFGVSFAMDMAGLILPADKELSRLTYYGPEKPNTISGFISLHSWRSKYLFDTAITSSPEDIKRQIGISTQNIRKNLTLGNKIITKDVTDFLDMATALLILGNGAPASLIYDIVHIPFEVFTSASLKIATNVWLTIITEKPEVAHLLLVEVCYCWMRSIDDNIGLYSRDHDLKGEEYQKMEYSPYDKAGINRDAKNASQAMQPHLHVIKFFASHFEGTLFQSDFLLKIFTKCALYGIKNLYKASLHPFARMIRHELLLFATLVLNASYKQGSKYMGRLSQEITNGALSWFKRPVAWPFGSNELKIKADLSVTRDLFLQLNKLSSLMSRHCGKDYKILNYFLASEIQQIQTWLTPTEKIEGADSNELTSDIVEATFAKDPTLAINLLQRCYSKKAEDVLVGLVAKHALMCVGSPSALDLFIKGSHLSSKKDLHATLYWAPVSPLKSINLFLPEWQGNSFILQFSIYSLESQDVNLAFFYVPQIVQCLRYDKTGYVERLILDTAKISVLFSHQIIWNMLANCYKDDEGIQEDEIKPTLDRIRERMVSSFSQSHRDFYEREFEFFDEVTGISGKLKPYIKKSKAEKKHKIDEEMSKIEVKPDVYLPSNPDGVVIDIDRKSGKPLQSHAKAPFMATFKIKKDVKDPLTGKNKEVEKWQAAIFKVGDDCRQDVLALQLISLFRTIWSSIGLDVYVFPYRVTATAPGCGVIDVLPNSVSRDMLGREAVNGLYEYFTSKFGNESTIEFQNARNNFVKSLAGYSVISYLLQFKDRHNGNIMYDDQGHCLHIDFGFIFDIVPGGIKFEAVPFKLTKEMVKVMGGSPQTPAYLDFEELCIKAYLAARPHVEAIIECVNPMLGSGLPCFKGHKTIRNLRARFQPQKTDHEAALYMKALIRKSYESIFTKGYDEFQRLTNGIPY

SEQ ID NO: 391 - DNA, 3282 bp, Saccharomyces cerevisiae
atgccatttgatgttttgatatcaaaccaaaaagataataccaatcaccagaacatcacgccaatatcaaaatcagttcttttggcgcctcattcaaaccatccagtgattgaaatagctacgtattcagaaaccgatgtatacgaatgctatatacgtgggtttgaaactaaaatagtgatgagaagaactaaagatgattggattaatattacccaggttttcaaaatagctcaattttcgaagacgaaaagaactaaaatactggaaaaggaatcaaatgatatgcaacatgaaaaagttcaaggtgggtatggtaggtttcaaggtacttggatcccactggattcagcgaagtttttagtcaataagtacgaaataattgaccctgtggtcaactccatcttaacttttcaattcgatccaaataaccctccaccaaagagaagcaaaaatagtatattgaggaagacttcgccgggaacgaagataacttctccatcgagctacaataaaacaccaagaaaaaagaacagtagttcatcaacatcggctacaactacagctgcgaataagaaaggcaagaaaaatgcatcgatcaaccagccgaatccaagtcctttacaaaaccttgttttccaaactcctcaacagttccaagtaaattcatcaatgaatataatgaacaataatgataaccacaccacgatgaatttcaacaatgacacaagacacaatttaataaataatattagtaacaacagcaatcaatctactattattcaacaacaaaaatccattcatgaaaactctttcaataataattattcggcaactcagaaacctcttcaattttttccaattccgacaaatttacaaaacaagaacgttgctctgaataaccctaataataatgacagtaatagttacagccataacatcgacaatgtcattaacagcagtaataacaataataatggcaataataataacttgatcatagttccagacggacctatgcaaagccaacaacaacaacaacatcatcatgaatatttgacgaataacttcaatcattccatgatggactccattacaaatggcaatagtaaaaaaaggaggaaaaagctgaatcaatctaatgaacaacaattttacaaccagcaagaaaaaatacaaaggcatttcaaattaatgaagcaacccttattatggcaatcctttcaaaatccaaatgatcaccataatgagtactgtgacagtaacggcagcaacaataacaacaacactgtagcatccaatggctcctccattgaagtattttcatcaaatgaaaatgataacagtatgaatatgtcttcacgatctatgacaccgttcagcgcaggaaatacttcatctcaaaacaagttggaaaacaaaatgacagatcaagaatacaagcagacgatattaacaatactatcatcggaaaggtcttctgatgtagatcaagcgttgttggctactttatatccggcgcccaaaaattttaacataaattttgaaattgatgatcaaggtcacactccactccattgggctacagctatggcgaatattcctttgataaaaatgctaattaccttaaatgctaatgcattacagtgtaataagctcggttttaattgcatcacaaaatcaattttctacaacaattgctacaaggagaatgctttcgatgaaataatatccatcttaaaaatatgtcttataactcccgacgtaaatggaagattgccatttcattatttaattgaattgagcgttaataagtccaaaaatccaatgataataaaatcttatatggattcgataatattgagcttgggtcagcaggactacaatttgttgaagatatgtttgaactaccaagataatatagggaacactccactgcatttatctgctttaaacttgaacttcgaggtttacaacagactggtatatcttggtgcgtcaacagatatattgaatctagataacgaatcgcctgcgtcaataatgaataagtttaatactccggctggcgggtcaaacagcagaaacaacaacaccaaggcagatcgaaagttagctcgaaaccttcctcaaaagaattattaccaacaacagcaacagcaacagcaaccacaaaacaatgtcaaaattccaaaaattataaaaactcaacatcctgataaagaagattctactgcagatgtcaatatagctaaaacagattctgaagtcaacgaaagtcaatacctgcattccaaccagccaaattctacaaatatgaacactattatggaagacttgtcgaatattaattctttcgtgacgtcgtctgtcattaaagatataaagtctacgccgtccaaaattcttgaaaactctcccattttatacagaagaagatcacagtcaatatcagatgaaaaagaaaaggcaaaggataatgagaatcaagttgaaaagaaaaaggatcccttgaatagtgtgaaaactgccatgccatcattggaatcgccttcttcccttctgccgatacagatgtctccactaggaaagtactcaaaaccgctttcgcagcagatcaacaaattaaatacaaaagtttcttctctacaaagaataatgggtgaagaaattaaaaatctggacaacgaagtagtagaaaccgaatcctctatttctaacaataagaagagattgattacaatagcacatcaaatagaggatgctttcgattccgtatcaaacaaaactcccataaattcgatatcagatttacaatcaaggattaaagaaacatcgtcaaagttgaattctgaaaagcaaaattttattcaaagcttggaaaaatctcaagctttaaaactggctacaattgtccaggatgaggaatcaaaggttgatatgaatactaactcaagttcacatccagaaaaacaggaagatgaagagccaattccaaagtcaacgtcggaaacttcttctcctaaaaacaccaaagcggacgccaaattttctaatactgtacaagaatcatatgatgtaaatgagacgttgagactagcaacggaactaactattctacagtttaaaagaaggatgacaacattgaaaataagcgaagctaaaagcaaaattaattcatcggtgaagttagataaatacagaaacttgattggtatcacaattgagaacattgactcaaaattggacgatatagaaaaggatttgagggcaaacgcataa

SEQ ID NO: 392 - protein, 1093 aa, Saccharomyces cerevisiae
MPFDVLISNQKDNTNHQNITPISKSVLLAPHSNHPVIEIATYSETDVYECYIRGFETKIVMRRTKDDWINITQVFKIAQFSKTKRTKILEKESNDMQHEKVQGGYGRFQGTWIPLDSAKFLVNKYEIIDPVVNSILTFQFDPNNPPPKRSKNSILRKTSPGTKITSPSSYNKTPRKKNSSSSTSATTTAANKKGKKNASINQPNPSPLQNLVFQTPQQFQVNSSMNIMNNNDNHTTMNFNNDTRHNLINNISNNSNQSTIIQQQKSIHENSFNNNYSATQKPLQFFPIPTNLQNKNVALNNPNNNDSNSYSHNIDNVINSSNNNNNGNNNNLIIVPDGPMQSQQQQQHHHEYLTNNFNHSMMDSITNGNSKKRRKKLNQSNEQQFYNQQEKIQRHFKLMKQPLLWQSFQNPNDHHNEYCDSNGSNNNNNTVASNGSSIEVFSSNENDNSMNMSSRSMTPFSAGNTSSQNKLENKMTDQEYKQTILTILSSERSSDVDQALLATLYPAPKNFNINFEIDDQGHTPLHWATAMANIPLIKMLITLNANALQCNKLGFNCITKSIFYNNCYKENAFDEIISILKICLITPDVNGRLPFHYLIELSVNKSKNPMIIKSYMDSIILSLGQQDYNLLKICLNYQDNIGNTPLHLSALNLNFEVYNRLVYLGASTDILNLDNESPASIMNKFNTPAGGSNSRNNNTKADRKLARNLPQKNYYQQQQQQQQPQNNVKIPKIIKTQHPDKEDSTADVNIAKTDSEVNESQYLHSNQPNSTNMNTIMEDLSNINSFVTSSVIKDIKSTPSKILENSPILYRRRSQSISDEKEKAKDNENQVEKKKDPLNSVKTAMPSLESPSSLLPIQMSPLGKYSKPLSQQINKLNTKVSSLQRIMGEEIKNLDNEVVETESSISNNKKRLITIAHQIEDAFDSVSNKTPINSISDLQSRIKETSSKLNSEKQNFIQSLEKSQALKLATIVQDEESKVDMNTNSSSHPEKQEDEEPIPKSTSETSSPKNTKADAKFSNTVQESYDVNETLRLATELTILQFKRRMTTLKISEAKSKINSSVKLDKYRNLIGITIENIDSKLDDIEKDLRANA

SEQ ID NO: 393 - DNA, 2412 bp, Saccharomyces cerevisiae
atggcgttggaagaagtggtacgatacttaggacctcacaatgagatccctttgacactcactagagactcggagactggccatttcctcctgaaacattttctgcccattttgcagcaatatcatgacacggggaatattaacgagaccaaccccgatagtttccccactgatgaggaaagaaataaattactggcacattatggaattgctgtaaatacagacgaccgaggtgagttatggatagagctggaaaaatgtttacaattattaaacatgctaaatttattcggtttgttccaggatgcattcgaatttgaggagcctgaaacagatcaggatgaagaagatcccagccattcgaaactaccagaaaacaagaccaaaagtgaaaattctaaggataatatcagctcaaagaggattaataatttacaagatatgagcctggattctgatgcacacagagaattaggctctcctttaaaaaaactaaaaatagatacctctgtaatagatgctgagagtgactccactccgaatactgccagaggcaagcctaacgatgatattaataagggccctagcggcgacaatgaaaataatggcactgatgacaatgacagaaccgctggacctatcataacattcactcatgacctaacttctgactttttaagcagtccactgaaaatcatgaaagcactaccttctccagttgtaaatgataatgaacagaagatgaaactagaggcattcttacaacggttgttatttccagaaattcaagaaatgcctacatcccttaataatgacagcagtaatagaaattcagaaggggggagctcaaaccaacaacaacagcacgtatcatttgatagccttttgcaagaggtaaacgacgcttttcctaatactcaattaaatcttaatattcctgtagatgagcatggaaacacaccattacattggctgacttcaatagcaaacctggaattagtgaaacacctggttaagcatggttcaaacagattatatggtgataatatgggggagtcatgcctagtgaaagctgtcaaatcagtaaataattacgactctggtacttttgaggcacttctagattatttatatccatgtttaattttggaagactcaatgaatagaacaattttgcaccatatcattattacgtctggtatgactggctgttcagcagctgcgaaatattatttagatattttaatgggatggattgtcaagaaacaaaatagacccattcaaagtggtactaacgaaaaagaaagcaaaccgaatgacaaaaatggggaaagaaaggactctatactagaaaatttggacctgaaatggataatagcaaacatgctcaatgcgcaggactctaatggcgatacttgcttgaacattgcagcaagattgggaaacatttcaatagtagacgctttattagattacggtgctgacccatttattgcaaacaaatcagggttgagacccgtggattttggggcaggtacttcaaaattacaaaatacgaacggcggtgacgaaaactcgaagatggtctctaagggtgattacgacggtcaaaaaaatggaaaggccaaaaaaataaggtctcaactgttgaaaaacccacctgaaacaacttcgttaattaatgatgtccaaaatttactgaattcaatctcgaaagattatgagaatgaaacagtgcaatataatgagaaattagaaaaactacacaaggaattgaacgaacagcgagaagaattagctaattctagagaacaactagcaaatgtgaagcaattgaaagatgaatactcactaatgcaagagcaattgaccaatttaaaagcaggaattgaagaagaagaggaaagttttagggaagagagcaaaaagctaggaataattgcagatgaaagttcaggtattgattgggactctagcgaatatgatgcagatgaacccttcaaagtagagttcctttcagatttcttggaggataaattacaaaagaattatgaaggcgatatttccaaactattagaagcggagtcgaaagagcagataatggaacagatacgaaatcaacttcccgcagaaaaaatccaatcgatgcttccaccaacggtcttattgaaggcaagaataaatgcatacaagcggaatgataaacacctaaccaatgtattggatacaatcagcaccaaacaatcagaattagagaataaatttagaagagtgttatctttatgtttgaaaatcgacgaaaataaagttgacaatatgcttgatggtttgttacaggccatatcttctgaagacccacaagacattgacactgacgaaatgcaagattttttaaaaaagcatgcttcatga

SEQ ID NO: 394 - protein, 803 aa, Saccharomyces cerevisiae
MALEEVVRYLGPHNEIPLTLTRDSETGHFLLKHFLPILQQYHDTGNINETNPDSFPTDEERNKLLAHYGIAVNTDDRGELWIELEKCLQLLNMLNLFGLFQDAFEFEEPETDQDEEDPSHSKLPENKTKSENSKDNISSKRINNLQDMSLDSDAHRELGSPLKKLKIDTSVIDAESDSTPNTARGKPNDDINKGPSGDNENNGTDDNDRTAGPIITFTHDLTSDFLSSPLKIMKALPSPVVNDNEQKMKLEAFLQRLLFPEIQEMPTSLNNDSSNRNSEGGSSNQQQQHVSFDSLLQEVNDAFPNTQLNLNIPVDEHGNTPLHWLTSIANLELVKHLVKHGSNRLYGDNMGESCLVKAVKSVNNYDSGTFEALLDYLYPCLILEDSMNRTILHHIIITSGMTGCSAAAKYYLDILMGWIVKKQNRPIQSGTNEKESKPNDKNGERKDSILENLDLKWIIANMLNAQDSNGDTCLNIAARLGNISIVDALLDYGADPFIANKSGLRPVDFGAGTSKLQNTNGGDENSKMVSKGDYDGQKNGKAKKIRSQLLKNPPETTSLINDVQNLLNSISKDYENETVQYNEKLEKLHKELNEQREELANSREQLANVKQLKDEYSLMQEQLTNLKAGIEEEEESFREESKKLGIIADESSGIDWDSSEYDADEPFKVEFLSDFLEDKLQKNYEGDISKLLEAESKEQIMEQIRNQLPAEKIQSMLPPTVLLKARINAYKRNDKHLTNVLDTISTKQSELENKFRRVLSLCLKIDENKVDNMLDGLLQAISSEDPQDIDTDEMQDFLKKHAS

SEQ ID NO: 395 - DNA, 2220 bp, Aspergillus nidulans
atggctgctgttatcacgctccagtcgtcctcgacggctggtctccaacagggctctccatctgaccgtcatctccttcggccgctgctgcagaataaccctcagcaaccgccgctacagcagcagccgcttcaaccacagcaatccccctctcctgcccccattggcacccttcctcgtcttcctgcactgggccgggatggaccgagttgtgacgcctgtctgcgcagaaagagtcggtgtgctatgaacgaaatggtcaacaagtgttattcgtgcgactttcatcgccaggactgcaccttcaccctatcatcatcgtcaaccaccacaacaaccattaccacgaccgcgaccagcgcgaacagcgcgaacagcgccagcagtgccagcactgccggcaccagccgtccaagcacggctgacgtgcagtctaaaaagcgtaaactggacgatatcatcaatagtgatgcggattctcctaaaaggttatcgaccgtttctaaagctgacagtgctcgttcgcccttgagtgaacacccgcggttcaacgccgtctcatactggcatcagaccacccagcacatcggcctcactaccgagctggagcccgccctactggcctaccttccggtagaccagaacgacgagagtatcgttgctgcttcgcgggtacggaaactcagcgacgacggcacttttatgcgtgtcgtcaacaccatgtcgcatgcggatgctccgcagtccgccaccctggtctccatcgagagcctggttgctccctatgggtccaccttggtagagaagttcttcgagcacatccacccgaccttcccaattctgatggaagatgtcttccgccagtcgtacagaaccaggaatggcatctctccacttttactttctgctgtctacgtcctggccctcaagtttgttgacatcggaccagcctcgcagtccgcgcggcggcccgacgccactcgtcttgaggccactgctttgaggcttcttaatgaatctctaccatatgcatcaatatcgacgatccaagcggggctgttactcatgcaaaagtcgacgttggcaaccgctgctttgaacgcgcaattggtcaccgctgggtttgagctcgggcttcaccaggattgctccgactggcggatggaaacctgggagaagggcctgagaaagcgtctcgcctgggcactttacatgcaggacaaatggtccgcaatggtgcacggccggccatcacatgtcgtttcctccaactggactgtgcaggatctcgtggaagaagattttactgacgcgttcgcctcgaccgcatcccagccggaagacgcccctgtaggccacgggccgcttttcttctgtcatctagtggccctgaccaccattctctccgatatcctggaccgcttttacaccctccagtcaatacaagaatttaaagccgcgggcagcaaccgaacccgtctcatcctagaacgcgccaaaccggcccaaatccgtctcaaggaatggttcgcgcgtctacctgcatccctcaaactagactctaccaccgacctctttgagaacatcacggaggaaaatgcccgcaacggcgccctgcacctctcctacttcgccaccgaaatcactctccatcgctgcatcgtccgctccctctctccagattccacggacgcctacctctcccacatctgccgctccgccgcaaagacccgcctcatctcagcaatggactttgtaaaccgtctccgcccgcctcaccttcgctccttctggcccgccgcatccagaacccactttgccctcatcggctcgttcggcatcctcctacgtgtaacagcgccgaccaaagaagaagccgagttctaccgccttcggctctgcgagtaccgctggaccctgagcgtcagcaaaaaggacgccgaattcctcgagtttgcgctcgagtctctagacaacgcaacggatctagatcatcatgtccctgctaaaccaggaatcgatgagctgatgaccagctcgtcaaaaccatacattgcttctacttcggccagatcggggacgacgcaggaagaggcgattctggatttggacccgcgctctgggaccggaggcacctcctctgttatctcggggctggcttcaccggctacctcggttagtgaggaaagtatgcacgatgcggctgttgctccgatgtaa

SEQ ID NO: 396 - protein, 739 aa, Aspergillus nidulans
MAAVITLQSSSTAGLQQGSPSDRHLLRPLLQNNPQQPPLQQQPLQPQQSPSPAPIGTLPRLPALGRDGPSCDACLRRKSRCAMNEMVNKCYSCDFHRQDCTFTLSSSSTTTTTITTTATSANSANSASSASTAGTSRPSTADVQSKKRKLDDIINSDADSPKRLSTVSKADSARSPLSEHPRFNAVSYWHQTTQHIGLTTELEPALLAYLPVDQNDESIVAASRVRKLSDDGTFMRVVNTMSHADAPQSATLVSIESLVAPYGSTLVEKFFEHIHPTFPILMEDVFRQSYRTRNGISPLLLSAVYVLALKFVDIGPASQSARRPDATRLEATALRLLNESLPYASISTIQAGLLLMQKSTLATAALNAQLVTAGFELGLHQDCSDWRMETWEKGLRKRLAWALYMQDKWSAMVHGRPSHVVSSNWTVQDLVEEDFTDAFASTASQPEDAPVGHGPLFFCHLVALTTILSDILDRFYTLQSIQEFKAAGSNRTRLILERAKPAQIRLKEWFARLPASLKLDSTTDLFENITEENARNGALHLSYFATEITLHRCIVRSLSPDSTDAYLSHICRSAAKTRLISAMDFVNRLRPPHLRSFWPAASRTHFALIGSFGILLRVTAPTKEEAEFYRLRLCEYRWTLSVSKKDAEFLEFALESLDNATDLDHHVPAKPGIDELMTSSSKPYIASTSARSGTTQEEAILDLDPRSGTGGTSSVISGLASPATSVSEESMHDAAVAPM

SEQ ID NO: 397 - DNA, 1461 bp, Saccharomyces cerevisiae
atgagtcttaaagaagacgactttggcaaggataattctagaaatatagaatcatatactggtagaatttttgacgtatatatacaaaaagattcgtattcacagtcggccttggatgatatgtttccagaagccgtagtttcaaccgccgcttgtgtgaaaaatgaagcggaggataacatcaatctcatagacacgcatcctcaattcgaactggtaaatactggactgggtgctaaatcggacgatttgaaatctccatcagcaaaggctacgttcactgacaagcagaggaagaatgaagtaccaaatatatctgtgagcaactactttcccggacaaagtagcgaaacgtcgtcaacaacggaatcttggactatcggttgtgataagtggtcagaaaaggtagaagaggcattccttgaggcacttagactgataatgaaaaatgggaccacaaaaataaaaataagaaatgccaattttggaagaaacgagctgatttcattatatatcaagcacaaaaccaacgagttcagaaccaaaaagcaaatttcttcccatattcaagtctggaagaagaccatacaaaacaaaatcaaggactcgctgaccctatcatcaaaggagaaggagcttctacaccttatcgaacatggcgctgaacaaactactgaaaactcaaacctgttttatgacatatttgaagaaattatcgactctctaccttcagtcagtgattctggaagtttaacccctaaaaacctctatgtaagtaataatagcagtggattgtcagtacattcaaaactgcttacgccaatcactgcttccaacgagaaaaaaattgaaaatttcataaaaactaatgctgcatctcaagccaaaacccccctcatttacgctaagcacatttatgaaaacatagacggctacaagtgcgttccgtcaaagaggcctcttgaacaactttcccccacggaactccaccagggagatcgccccaataaggctagcttttccaacaagaaggcaatcctggagagtgcaaaaaaaatcgaaatagagcagagaaagataatcaacaaataccaaagaatttcccgcatacaagaacatgaaagtaatcctgagttcagttccaattccaattccggttcagagtacgaatcggaggaagaagtagtcccaagatcagccacagtcacacaactccaaagcagaccagtgccatactacaagaataatggaatgccctactcactctccaaagtacgaggaaggcccatgtatccaagacctgctgaagatgcttacaatgccaattatattcaaggtctgccccagtaccaaacatcttatttttcgcagctgttattatcatcaccccagcattacgaacattctccacatcaaaggaactttacgccatccaaccaatcgcatgggaacttttattaa

SEQ ID NO: 398 - protein, 486 aa, Saccharomyces cerevisiae
MSLKEDDFGKDNSRNIESYTGRIFDVYIQKDSYSQSALDDMFPEAVVSTAACVKNEAEDNINLIDTHPQFELVNTGLGAKSDDLKSPSAKATFTDKQRKNEVPNISVSNYFPGQSSETSSTTESWTIGCDKWSEKVEEAFLEALRLIMKNGTTKIKIRNANFGRNELISLYIKHKTNEFRTKKQISSHIQVWKKTIQNKIKDSLTLSSKEKELLHLIEHGAEQTTENSNLFYDIFEEIIDSLPSVSDSGSLTPKNLYVSNNSSGLSVHSKLLTPITASNEKKIENFIKTNAASQAKTPLIYAKHIYENIDGYKCVPSKRPLEQLSPTELHQGDRPNKASFSNKKAILESAKKIEIEQRKIINKYQRISRIQEHESNPEFSSNSNSGSEYESEEEVVPRSATVTQLQSRPVPYYKNNGMPYSLSKVRGRPMYPRPAEDAYNANYIQGLPQYQTSYFSQLLLSSPQHYEHSPHQRNFTPSNQSHGNFY

SEQ ID NO: 399 - DNA, 1194 bp, Saccharomyces cerevisiae
atgtcgactgaagaacaaaatggaggtggtcaaaagtctctagatgatagacaaggtgaggaatcacaaaaaggtgagactagtgaaagggaaacaacagccacagagagcggtaacgaaagtaagtctgtagaaaaagagggtggagaaacccaagaaaaaccgaagcagccacatgtcacttattacaatgaggagcagtataaacagtttattgcccaagcgagagttacagtgggaagtatagtttacaagaactttcagatattaaggacactgggtacgggttcttttggtagggtccatttgattagatcaagacataatggcagatactacgccatgaaagttttgaaaaaggaaatcgtggtaagattgaaacaggtggagcataccaacgacgagcgattgatgctttctatcgtaacacatccgtttattattagaatgtgggggactttccaagatgctcagcaaattttcatgattatggattatattgaaggtggagaattgttttctttgttaaggaaatcccaaagatttcccaacccagttgctaaattttacgcagcggaagtttgtttagctttggagtacttgcatagcaaggacattatttatagggatttgaaaccggaaaatatcttgcttgataaaaacgggcatataaagataacagatttcgggtttgccaaatacgttcctgacgtcacatatacattatgcggtactcccgactacatagcacccgaggtcgttagtactaaaccatataataaatctatcgattggtggagtttcggtattctgatttacgaaatgctagcaggatacacgccattttacgactctaacacgatgaaaacctatgagaaaatcttgaatgccgaattgagatttccaccatttttcaacgaagatgtaaaggacctgttgagtagattgatcacaagagacttaagtcaaagactaggtaatttacaaaatggtacagaagatgtcaaaaaccacccctggttcaaagaagttgtctgggaaaaattattatctagaaacatagaaacgccgtatgaaccgcccattcaacagggacaaggtgacacctcacagttcgataagtacccggaagaagacatcaactacggtgttcaaggtgaagacccatatgctgatcttttccgggacttctaa

SEQ ID NO: 400 - protein, 397 aa, Saccharomyces cerevisiae
MSTEEQNGGGQKSLDDRQGEESQKGETSERETTATESGNESKSVEKEGGETQEKPKQPHVTYYNEEQYKQFIAQARVTVGSIVYKNFQILRTLGTGSFGRVHLIRSRHNGRYYAMKVLKKEIVVRLKQVEHTNDERLMLSIVTHPFIIRMWGTFQDAQQIFMIMDYIEGGELFSLLRKSQRFPNPVAKFYAAEVCLALEYLHSKDIIYRDLKPENILLDKNGHIKITDFGFAKYVPDVTYTLCGTPDYIAPEVVSTKPYNKSIDWWSFGILIYEMLAGYTPFYDSNTMKTYEKILNAELRFPPFFNEDVKDLLSRLITRDLSQRLGNLQNGTEDVKNHPWFKEVVWEKLLSRNIETPYEPPIQQGQGDTSQFDKYPEEDINYGVQGEDPYADLFRDF

SEQ ID NO: 401 - DNA, 1143 bp, Saccharomyces cerevisiae
atggaattcgttgcagaaagggctcagccagttggtcaaacaatccagcagcaaaatgttaatacttacgggcaaggcgtcctacaaccgcatcatgatttacagcagcgacaacaacaacaacagcagcgtcagcatcaacaactgctgacgtctcagttgccccagaaatctctcgtatccaaaggcaaatatacactacatgacttccagattatgagaacgcttggtactggatcttttggtagggttcatttggtgcgctctgttcacaatggtcggtattatgctataaaagttttaaagaaacaacaagttgtcaagatgaaacaggttgaacataccaatgacgaacgacgtatgctaaagcttgtggagcatccgtttctgattagaatgtggggtacgtttcaagatgctaggaatatctttatggtgatggattatatcgaaggtggtgaacttttctcgttactgagaaagtcacaaagatttcctaatcctgtagcaaaattttacgctgcggaagtcatactggcattagagtacttgcatgctcataatatcatctacagggatttaaagccagaaaatatcttgctggatagaaatggccacattaaaataaccgattttgggttcgccaaagaggtacaaactgtcacatggacgctttgtgggactcctgattacattgctcctgaagttattaccacaaagccatataataagtcggtggattggtggtctctaggtgttctaatctacgaaatgttagctggttatacacccttttacgatactactccaatgaagacgtatgaaaagattttacaaggtaaagtagtatatccaccatattttcatcccgacgtcgtggatctactaagcaaactgatcactgcagatttgacaagaagaatcggtaatttacaaagcggttccagggacatcaaagctcacccatggtttagtgaagttgtatgggaaagattgttagcaaaggatattgaaactccatacgagcctcctatcacatcaggtatcggtgacacgtctttattcgatcaatatcccgaggagcagctagattatggtattcaaggcgatgatccatatgctgaatactttcaagatttctaa

SEQ ID NO: 402 - protein, 380 aa, Saccharomyces cerevisiae
MEFVAERAQPVGQTIQQQNVNTYGQGVLQPHHDLQQRQQQQQQRQHQQLLTSQLPQKSLVSKGKYTLHDFQIMRTLGTGSFGRVHLVRSVHNGRYYAIKVLKKQQVVKMKQVEHTNDERRMLKLVEHPFLIRMWGTFQDARNIFMVMDYIEGGELFSLLRKSQRFPNPVAKFYAAEVILALEYLHAHNIIYRDLKPENILLDRNGHIKITDFGFAKEVQTVTWTLCGTPDYIAPEVITTKPYNKSVDWWSLGVLIYEMLAGYTPFYDTTPMKTYEKILQGKVVYPPYFHPDVVDLLSKLITADLTRRIGNLQSGSRDIKAHPWFSEVVWERLLAKDIETPYEPPITSGIGDTSLFDQYPEEQLDYGIQGDDPYAEYFQDF

SEQ ID NO: 403 - DNA, 1197 bp, Saccharomyces cerevisiae
atgtatgttgatccgatgaacaacaatgaaatcaggaaattaagcattactgccaagacagaaacaactccagataacgttggacaagacattcctgtaaacgcacattcggtgcatgaggaatgttcttccaacacacccgtggagataaatggaagaaacagcggaaagttgaaagaagaagcgtctgcaggtatttgtttggttaaaaaaccaatgctacaatatagagatacctcaggaaagtattccctaagtgactttcagattttaagaactttgggaactggctcatttgggagagttcacctaattcgttccaatcacaatgggaggttttacgctttgaagacattgaaaaagcacactatagtgaagctgaagcaggttgaacacaccaatgacgaacgccgaatgctttcaattgtttcacatccattcatcattcgaatgtggggaacgttccaagattctcagcaagttttcatggtaatggactacattgaaggtggtgaattattttctttactacgtaaatctcaaagatttcccaacccagtagccaaattttatgccgcagaggtatgcttagcgttggaatatttgcacagtaaggatataatatatagagacttgaaaccagaaaatatccttctagataaaaacggccatatcaagataaccgactttggcttcgcaaaatacgttcccgatgtcacatacacattatgtggcacaccagattacatagcgccggaagtggtcagtacaaaaccgtataataaatcagtggattggtggagttttggtgtgctaatctatgaaatgcttgccggatacactccattttacaattcgaacaccatgaaaacttacgaaaatatactgaacgccgaattgaagttcccaccatttttccatccagacgcgcaggacttattgaagaagctaattaccagagacttaagtgaaaggttgggtaacttacaaaatggaagtgaagatgtcaagaaccatccgtggtttaacgaagtgatatgggagaaattgttagcaagatacatagaaacgccgtacgaaccaccaatccaacagggccaaggtgacacttctcaatttgacagataccctgaagaggaattcaactatggaattcaaggggaggatccatatatggatttaatgaaagaattttaa

SEQ ID NO: 404 - protein, 398 aa, Saccharomyces cerevisiae
MYVDPMNNNEIRKLSITAKTETTPDNVGQDIPVNAHSVHEECSSNTPVEINGRNSGKLKEEASAGICLVKKPMLQYRDTSGKYSLSDFQILRTLGTGSFGRVHLIRSNHNGRFYALKTLKKHTIVKLKQVEHTNDERRMLSIVSHPFIIRMWGTFQDSQQVFMVMDYIEGGELFSLLRKSQRFPNPVAKFYAAEVCLALEYLHSKDIIYRDLKPENILLDKNGHIKITDFGFAKYVPDVTYTLCGTPDYIAPEVVSTKPYNKSVDWWSFGVLIYEMLAGYTPFYNSNTMKTYENILNAELKFPPFFHPDAQDLLKKLITRDLSERLGNLQNGSEDVKNHPWFNEVIWEKLLARYIETPYEPPIQQGQGDTSQFDRYPEEEFNYGIQGEDPYMDLMKEF

SEQ ID NO: 405 - DNA, 1797 bp, Fusarium sporotrichioides
atgactgtcgtagttccagaggaaggtctcgaccttgaatctcagccggacgacaggatgagagccaaagccctcgccacttcagccgcagagctaccagacggatattacagatcacctcgcatcgtggcgtcctttgcagccttttcaatgaacgtcgttgctacgtattttgttctccaagcatcagcttccgctcttcccaatatactccaagatgttggccagagtgaaaactcaagtctcttctcgactctatggacgactggccaagctgtcagtattctgatgatgggtcgcctcacggacagatttgggcgacggccatttgttattcttactcatattctgggactcgtcggcgctatcgttggatgcacagctaccaaattcaatactctcttggctgcaatgacgatgctgggtgttgccgctggcccagcaggtgccagtcctctattcattggcgagctgatgagcaacaaaaccaagtttttgggtcttctcatcgtatctgctcccgttgtcgccacgaatggtcttagcccctaccctggtcagcgtcttgctatacagggcagttggcgttggatcttctacatttatatcataatgagtacaattgcagtcacacttatcattatctggtactaccccccgtcatttgcgcaacttcacgggaaaaaggtcagcaagagagaggaactagcaaaagtcgattggataggtatcatacttgttattgccggaacatcgctctttcttcttggcgtttcttggggtgggcagccgaacaacccgtggaactctgccaaggtcatcggactcatatcatccggcgctggcactctcgttatctttgccttgtacgaggtctatggcaagcccgaacgccccatggttccgcctagtctcttcaaagatactcgtggctttgtctgcattcttatcatcagctccatcatgggctcgatgcacctttcccttgttatcatgtaccctcagcaagttgtcaatatcttcggctctagtttgaagaactgggaagagactgcatggatgtcagcgactgcctcattcggcacaggtgctggagtggtggttcttggtagcttgtttcatcttgtcaggcacatccgttggcaaatacttgtcggagctatgtggcttactgctttcctcggagccatgtcatctatcaaccgagacaacaagaactctgccattgctttgtcagttatgaccggctttgtcgtcgcctgggctcaggacatcactatgctcctagtccaattcatcacgacagatgaaaacttaggcgtggcctttgctgttgttgctgcggcccgcccctttgccggctctatcttcaccgccgccttcatctccgtctacaccaaccggtatccgcgcgagctggcaacccatcttagttcagccctgcgtggtacgggctttccacaaggaagtttctccagtcttcttgaggccgccaagtcgggacgaatggaagccgtgaacgctctccctgggatgacgaccgaaatctcttcggtggtcagccaagctatggcggatagttacacagcttcatatgctaatgtctattacttcgccatggctctgggtgtcatcccaatcattgccagcctttgtatgagggatttggactgctacttaactgaccacgttccgcatcagctttatgacagaaagaacgcccataaagacgtacttgagggtaactctgaatcacaaccatctccaattatactttcgatggctgataaagaatga

SEQ ID NO: 406 - protein, 598 aa, Fusarium sporotrichioides
MTVVVPEEGLDLESQPDDRMRAKALATSAAELPDGYYRSPRIVASFAAFSMNVVATYFVLQASASALPNILQDVGQSENSSLFSTLWTTGQAVSILMMGRLTDRFGRRPFVILTHILGLVGAIVGCTATKFNTLLAAMTMLGVAAGPAGASPLFIGELMSNKTKFLGLLIVSAPVVATNGLSPYPGQRLAIQGSWRWIFYIYIIMSTIAVTLIIIWYYPPSFAQLHGKKVSKREELAKVDWIGIILVIAGTSLFLLGVSWGGQPNNPWNSAKVIGLISSGAGTLVIFALYEVYGKPERPMVPPSLFKDTRGFVCILIISSIMGSMHLSLVIMYPQQVVNIFGSSLKNWEETAWMSATASFGTGAGVVVLGSLFHLVRHIRWQILVGAMWLTAFLGAMSSINRDNKNSAIALSVMTGFVVAWAQDITMLLVQFITTDENLGVAFAVVAAARPFAGSIFTAAFISVYTNRYPRELATHLSSALRGTGFPQGSFSSLLEAAKSGRMEAVNALPGMTTEISSVVSQAMADSYTASYANVYYFAMALGVIPIIASLCMRDLDCYLTDHVPHQLYDRKNAHKDVLEGNSESQPSPIILSMADKE

SEQ ID NO: 407 - DNA, 2142 bp, Saccharomyces cerevisiae
atgactgccagcgtttcgaatacgcagaataagctgaatgagcttctcgatgccatcagacaggagtttctccaagtctcacaagaggcaaatacctaccgtcttcaaaaccaaaaggattacgatttcaaaatgaaccagcagctggctgagatgcagcagataagaaacaccgtctacgaactggaactaactcacaggaaaatgaaggacgcgtacgaagaagagatcaagcacttgaaactagggctggagcaaagagaccatcaaattgcatctttgaccgtccagcaacagcggcaacagcaacagcagcaacaggtccagcagcatttacaacagcaacagcagcagctagccgctgcatctgcatctgttccagttgcgcaacaaccaccggctactacttcggccaccgccactccagcagcaaacacaactactggttcgccatcggccttcccagtacaagctagccgtcctaatctggttggctcacagttgcctaccaccactttgcctgtggtgtcctcaaacgcccaacaacaactaccacaacagcaactgcaacagcagcaacttcaacaacagcaaccacctccccaggtttccgtggcaccattgagtaacacagccatcaacggatctcctacttctaaagagaccactactttaccctctgtcaaggcacctgaatctacgttgaaagaaactgaaccggaaaataataatacctcgaagataaatgacaccggatccgccaccacggccaccactaccaccgcaactgaaactgaaatcaaacctaaggaggaagacgccaccccggctagtttgcaccaggatcactacttagtcccttataatcaaagagcaaaccactctaaacctatcccacctttccttttggatctagattcccagtctgttcccgatgctctgaagaagcaaacaaatgattattatattttatacaacccggcactaccaagagaaattgacgttgagttacacaaatctttggatcatacttcagttgtttgttgcgtgaagttcagtaacgatggtgaatacttagccacaggctgcaacaaaactactcaagtgtatcgcgtttcagatggttctctggtggcccgtctatctgacgattctgctgccaataaccatcgaaattcgatcactgaaaataacaccaccacgtccacggataacaatacaatgacaaccactactaccaccacaattactaccacagcgatgacttcggcagcagaattggcaaaagatgtggaaaacctgaacacttcgtcttccccatcatccgacttgtatatccgttcagtgtgtttttctccagatgggaaatttttggcaacaggtgctgaagacagactgattagaatttgggatattgaaaatagaaagattgttatgattcttcaaggccacgaacaagatatttattcattggactactttccctcaggtgacaaattagtctccggttctggtgaccgtaccgttcgtatttgggacttacgtacaggccagtgttcattgactttatccattgaagatggtgttaccaccgtcgctgtatcaccaggtgatggtaaatacatcgctgctggttctctagatcgtgctgtgagagtttgggattccgagaccggattcttggtggaaagactagattcggaaaacgaatccggtacaggccacaaggactctgtttatagcgttgtcttcactagagatggacaaagcgttgtatccggctcattagatagatctgttaagctctggaatttgcagaatgcaaacaacaagagcgattcgaaaactccaaattccggcacttgtgaagttacgtatatcgggcataaagactttgtattgtccgtggccaccacacaaaatgatgagtacatcttgtccggttccaaagatcgtggtgtcctgttttgggataagaaatccggcaatccgttattgatgttgcaaggtcataggaattcagttatatctgtggctgtggcaaacgggtctccgctgggtccagaatataacgtttttgctactggtagcggtgattgtaaagcaaggatttggaagtataaaaaaatagcgccaaattaa

SEQ ID NO: 408 - protein, 713 aa, Saccharomyces cerevisiae
MTASVSNTQNKLNELLDAIRQEFLQVSQEANTYRLQNQKDYDFKMNQQLAEMQQIRNTVYELELTHRKMKDAYEEEIKHLKLGLEQRDHQIASLTVQQQRQQQQQQQVQQHLQQQQQQLAAASASVPVAQQPPATTSATATPAANTTTGSPSAFPVQASRPNLVGSQLPTTTLPVVSSNAQQQLPQQQLQQQQLQQQQPPPQVSVAPLSNTAINGSPTSKETTTLPSVKAPESTLKETEPENNNTSKINDTGSATTATTTTATETEIKPKEEDATPASLHQDHYLVPYNQRANHSKPIPPFLLDLDSQSVPDALKKQTNDYYILYNPALPREIDVELHKSLDHTSVVCCVKFSNDGEYLATGCNKTTQVYRVSDGSLVARLSDDSAANNHRNSITENNTTTSTDNNTMTTTTTTTITTTAMTSAAELAKDVENLNTSSSPSSDLYIRSVCFSPDGKFLATGAEDRLIRIWDIENRKIVMILQGHEQDIYSLDYFPSGDKLVSGSGDRTVRIWDLRTGQCSLTLSIEDGVTTVAVSPGDGKYIAAGSLDRAVRVWDSETGFLVERLDSENESGTGHKDSVYSVVFTRDGQSVVSGSLDRSVKLWNLQNANNKSDSKTPNSGTCEVTYIGHKDFVLSVATTQNDEYILSGSKDRGVLFWDKKSGNPLLMLQGHRNSVISVAVANGSPLGPEYNVFATGSGDCKARIWKYKKIAPN

SEQ ID NO: 409 - DNA, 3183 bp, Aspergillus nidulans
atgctgaatcccagtacctcagatatccacacctcgcccacggccgttggaaatggaagaaaacgaccacaccctatagccgattcgggttctgctatgccttcagatccatcggcgcaacaactaccgcatccagccaatgaaagtgccgctatcccgtcgatagcgagttcgtcctctttccgaaacgtctccgcttgcaatcgatgtaggcagaggaaaaacagatgtgaccaacgactgccacgatgccaagcctgcgagaaggcaggggtccgttgcgtcggttacgatccgataacaaaacgtgaaattccccgcagctatgtctacttccttgagtcgagggtcgcgtacctcgagaaggtactgatggataacgggattgagtataatgaagctgtggcattcgatgaggaggaagctgtcaaaatcgaagcggggtatgaagcatatgcgggctcagcaaacggaccagctgccggcgaaatagccgcgcaggatgggagtaatgacaagtccgtgcggatcaagaaggaaaagaatgggcctcttgggctggaaaaggcttcgcgatatgaccatgacccggaggtgaagcaagactccgacgcagaagatggctggcggatacagaacctcgtttcgaatattgggatggtttcggtccaaggaacctcggatccgcggtatctgggttcaacgtctggaatttctttcgcccgggttgtatttgctgcggtaaagagttcagtgcctggaaactcatcggaacgtggtccatcgcgcccgaaggaacgtctaccgcatagcgccacgggaacggaagggagcaccacgcgggactcgtttttcgggctgcagacacggccgatgatgaagtgtgcagcattcccggacagggaactggccgagcggctggccgatctctatttcgaacatgcgaatccgcagatacccattgtacatcgtgttgactttatggaattgctcgaccgtacgtattccgttgacgagaaaagccgctcccctcgcagtctgtattttctcaatatcgtatttgccattggatctggaatcatatttgaagacaaaccagcagaagatcagaaagaaggtcgtgatcattccccctctgcaaccaagagacagcgcctctcaagtcgtcagtatcagccagaagaatatcatgcctctgccattgtccacttagagtctttcttgtcgacttctccaaccactgatggttttggtgctttggaggagcttcaggcagtcctcctccttgcaagttttgctctgctccgtcccgtggcgcctggcctctggtacattgtcggggttcgaatgcgtcttgcagttgaccttggccttcattatgaagatggagcaggcattgatggacctgaaaatgacaatatgaatgctacgaataacaaggacggcgaaaaggcgaagctacgcatcgacgaccacgagcgaggtcgcgcagaatgggtgcgtgactttcgtcggcgattgtggtggtgctgctacagttttgatcgtctggtcagctgctgtgtcggtcgtccgttcggcatcagtgatcaggccataagtacagaattcccatccatcctggaagacaaatatatcactaaatctgggataatcaaagccccggaaggcgctcccagttataaacattctgcctttcattattttaagctgcgcgtgctgcagtcggagattcaggacgttctgcagcaccagcaggcccgattcgcccgacaacgaggcccacccggcgccaggagctttatgcgccttgatgtcgtgtcacccttccttcaaggttttgactctttccgatcgtggcggagggacgttgatcggcggttgttggaatggaagaatagtgcgccgatgccttcggaaaatggtgtgaggtttccacttgagttcctggagttgaactactggcaagcagtcatcatgctctatcagcaaagcctcaccgttcccgctgagttggctgatgagctttcccctgctgaggatgtttccagtccgtccttttctcaggtagaagaggacgaacatgatatctattacaaggttgctgaagctgggcaaaaagtcatacggatataccgtcagatgcatcgtgtgcgattggttaattatacctatctagctactcatcatattttcatggctggaatttcattcctgtatgctatctggcactcgccatatgtgcggagtcgtctgacacttgatgaagtggacttcacggtcctagcagcgacgtcagtgcttagggacctcatgcacaagtgcccacccgcagaagcttgtcgtgacgcattcgaacggatgagcaaggccaccgtcgaaatgagtctttctacaactggctttgggccacaggttgaactgaaccgggtgcagaccagcactagcgggtcaagacagtttaatgcaacgcaatccagatcaaggccatattcgcgacagcaagcagagcaacggcagcgacagagcgcatctcggcgacaattacaaatgagacagtctcggcctctaccaagattcgatatgaacctcgaagatctctttggcgacaaccgcgcagtcgctgagaggcaaggtagtggtggcatgggaaagctagcccaaccctaccctgtctctgagacttcggatcctaattttgcgcggccacaatcccatcgcaatccgtctatggaatattacggccctttcgagaaccccgtctcgccacagcagccccaaccacaaccgcgatactactacaacaattccccccagcagagcggatcacccggcagcgtcgttgcggccagcggtatcccaccataccaagtaacacctacagagcaggaaaacccctcgggcatgggtctcgattatctggattacgatccaacaggtatcgagcgccacgtgtccctgggatctgaagagaactcggactttaaatttcaaggcggcgcacagtcactgggccatggtgctggccataatttcgggatcgatctaggtttcggcatggccgttgattttcaacatgattggagtgaaaatgccaattatgatctacttgaggggtatttcttcggtggagcaggcgcaactggaccgggacatgggcatgggcatggctcgggtatatag

SEQ ID NO: 410 - protein, 1060 aa, Aspergillus nidulans
MLNPSTSDIHTSPTAVGNGRKRPHPIADSGSAMPSDPSAQQLPHPANESAAIPSIASSSSFRNVSACNRCRQRKNRCDQRLPRCQACEKAGVRCVGYDPITKREIPRSYVYFLESRVAYLEKVLMDNGIEYNEAVAFDEEEAVKIEAGYEAYAGSANGPAAGEIAAQDGSNDKSVRIKKEKNGPLGLEKASRYDHDPEVKQDSDAEDGWRIQNLVSNIGMVSVQGTSDPRYLGSTSGISFARVVFAAVKSSVPGNSSERGPSRPKERLPHSATGTEGSTTRDSFFGLQTRPMMKCAAFPDRELAERLADLYFEHANPQIPIVHRVDFMELLDRTYSVDEKSRSPRSLYFLNIVFAIGSGIIFEDKPAEDQKEGRDHSPSATKRQRLSSRQYQPEEYHASAIVHLESFLSTSPTTDGFGALEELQAVLLLASFALLRPVAPGLWYIVGVRMRLAVDLGLHYEDGAGIDGPENDNMNATNNKDGEKAKLRIDDHERGRAEWVRDFRRRLWWCCYSFDRLVSCCVGRPFGISDQAISTEFPSILEDKYITKSGIIKAPEGAPSYKHSAFHYFKLRVLQSEIQDVLQHQQARFARQRGPPGARSFMRLDVVSPFLQGFDSFRSWRRDVDRRLLEWKNSAPMPSENGVRFPLEFLELNYWQAVIMLYQQSLTVPAELADELSPAEDVSSPSFSQVEEDEHDIYYKVAEAGQKVIRIYRQMHRVRLVNYTYLATHHIFMAGISFLYAIWHSPYVRSRLTLDEVDFTVLAATSVLRDLMHKCPPAEACRDAFERMSKATVEMSLSTTGFGPQVELNRVQTSTSGSRQFNATQSRSRPYSRQQAEQRQRQSASRRQLQMRQSRPLPRFDMNLEDLFGDNRAVAERQGSGGMGKLAQPYPVSETSDPNFARPQSHRNPSMEYYGPFENPVSPQQPQPQPRYYYNNSPQQSGSPGSVVAASGIPPYQVTPTEQENPSGMGLDYLDYDPTGIERHVSLGSEENSDFKFQGGAQSLGHGAGHNFGIDLGFGMAVDFQHDWSENANYDLLEGYFFGGAGATGPGHGHGHGSGI

SEQ ID NO: 411 - DNA, 1587 bp, Saccharomyces cerevisiae
atgaattatggcgtggagaagctgaaattgaaatattcgaagcatgggtgtattacttgcaagatcagaaagaagagatgctctgaagataaacctgtgtgccgggactgtcgtcgattaagttttccctgtatctatatatcagaatctgttgataagcagtctttgaaaaaaataaaggcagatatacagcaccagttgatcagcaagaaaagaaagcatgctcctgacagtgctcagaaagcggccgtggccacccgtactcgacgggtcggtagcgacgaacaggataaccaggtatatttgtcaaaaccgctggaagattgcatttctcagaagctggactctatgggattgcagctgtacaactactacaggtctcaccttgcaaacataatttccatcgcgcccatgaaccagaactactatctgaacattttcttgccaatggcccacgagaatgatggtatattgtttgctattcttgcttggtcagctaatcatttgtctatatcatcatcaaatgagctgcgaaaggatgaaatatttgtcaacttggcgaacaagtatacatacatgtcgttatcgcatctaaagacaaacgagggctcaagtgcctgtgctaaactggggtttctatattcactagcacaaatcctaatcttatgtggttcagagatatgtcagggtgatgtgaaattttggaagatattattgaatataggaaaaaatttgatcgaaaaccatgtgggcaaggatgtctcacggatactaaccactactacagaagaaccctccctagaggagaggataatcttccccaatttcaattccgttgttaagtactggctgattgtgaattttatatatcatgatattttgaatttcaatacaacgtccttcccgatcgaacaatacgagaaattcttccaaagggatcagaactctttacccagctcagccaactttattgagtcaatagactcgccaattgaggaaatagaccctttaattggcatcaacaagcctattttactactattgggacaagtcacaaatttgacgaggtttttgcagactatggaacaggaagaaatgctagagcatggcgataaaattttgagtttgcaagtcgagatttataaattacaaccttcgcttatggcgctggaacatttggatgatgaaaagaaattttactatttagaactattcgagataatgaaaatttctaccttaatgttctttcaattaactttattaaagattgacaaagattcgctggaactacagatactgagaaacaaattggactcgaagctagacaaggtcatcggaacttttttggaaggatcgttatgcttcccacttttcatttacggtgtatgcattcaggtagaagatatggagaaaaaaatagatttggaagccaaatttgacgacattttaaaacgatataaatgttacaatttccaaaatgctagattattgatacggaaaatttggcaaaacgaggctgatggcatcagtgagcatgacctggtccacatgattgacgaattagattacaatattaattttgcctga

SEQ ID NO: 412 - protein, 528 aa, Saccharomyces cerevisiae
MNYGVEKLKLKYSKHGCITCKIRKKRCSEDKPVCRDCRRLSFPCIYISESVDKQSLKKIKADIQHQLISKKRKHAPDSAQKAAVATRTRRVGSDEQDNQVYLSKPLEDCISQKLDSMGLQLYNYYRSHLANIISIAPMNQNYYLNIFLPMAHENDGILFAILAWSANHLSISSSNELRKDEIFVNLANKYTYMSLSHLKTNEGSSACAKLGFLYSLAQILILCGSEICQGDVKFWKILLNIGKNLIENHVGKDVSRILTTTTEEPSLEERIIFPNFNSVVKYWLIVNFIYHDILNFNTTSFPIEQYEKFFQRDQNSLPSSANFIESIDSPIEEIDPLIGINKPILLLLGQVTNLTRFLQTMEQEEMLEHGDKILSLQVEIYKLQPSLMALEHLDDEKKFYYLELFEIMKISTLMFFQLTLLKIDKDSLELQILRNKLDSKLDKVIGTFLEGSLCFPLFIYGVCIQVEDMEKKIDLEAKFDDILKRYKCYNFQNARLLIRKIWQNEADGISEHDLVHMIDELDYNINFA

SEQ ID NO: 413 - DNA, 1065 bp, Saccharomyces cerevisiae
atgatgaataacaacggcaaccaagtgtcgaatctctccaatgcgctccgtcaagtaaacataggaaacaggaacagtaatacaaccaccgatcaaagtaatataaattttgaattttcaacaggtgtaaataataataataataacaatagcagtagtaataacaataatgttcaaaacaataacagcggccgcaatggtagccaaaataatgataacgagaataatatcaagaataccttagaacaacatcgacaacaacaacaggcattttcggatatgagtcacgtggagtattccagaattacaaaattttttcaagaacaaccactggagggatatacccttttctctcacaggtctgcgcctaatggattcaaagttgctatagtactaagtgaacttggatttcattataacacaatcttcctagatttcaatcttggcgaacatagggcccccgaatttgtgtctgtgaaccctaatgcaagagttccagctttaatcgatcatggtatggacaacttgtctatttgggaatcaggggcgattttattacatttggtaaataaatattacaaagagactggtaatccattactctggtccgatgatttagctgaccaatcacaaatcaacgcatggttgttcttccaaacgtcagggcatgcgccaatgattggacaagctttacatttcagatacttccattcacaaaagatagcaagtgctgtagaaagatatacggatgaggttagaagagtttacggtgtagtggagatggccttggctgaacgtagagaagcgctggtgatggaattagacacggaaaatgcggctgcatactcagctggtacaacaccaatgtcacaaagtcgtttctttgattatcccgtatggcttgtaggagataaattaactatagcagatttggcctttgtcccatggaataatgtcgtggatagaattggcattaatatcaaaattgaatttccagaagtttacaaatggacgaagcatatgatgagaagacccgcggtcatcaaggcattgcgtggtgaatga

SEQ ID NO: 414 - protein, 354 aa, Saccharomyces cerevisiae
MMNNNGNQVSNLSNALRQVNIGNRNSNTTTDQSNINFEFSTGVNNNNNNNSSSNNNNVQNNNSGRNGSQNNDNENNIKNTLEQHRQQQQAFSDMSHVEYSRITKFFQEQPLEGYTLFSHRSAPNGFKVAIVLSELGFHYNTIFLDFNLGEHRAPEFVSVNPNARVPALIDHGMDNLSIWESGAILLHLVNKYYKETGNPLLWSDDLADQSQINAWLFFQTSGHAPMIGQALHFRYFHSQKIASAVERYTDEVRRVYGVVEMALAERREALVMELDTENAAAYSAGTTPMSQSRFFDYPVWLVGDKLTIADLAFVPWNNVVDRIGINIKIEFPEVYKWTKHMMRRPAVIKALRGE

SEQ ID NO: 415 - DNA, 729 bp, Saccharomyces cerevisiae
atgcaaaaacacaatataaaattaaaccaaaaccaggatatttcccaattattccacgatgaagtacccttattcgacaactctataacttcaaaggataaagaagtcattgaaactttatctgaaatatattctatagtaatcacactagaccacgtagagaaagcctacctaaaagactccatagatgacacccaatacactaatactgttgacaaattactaaagcagttcaaggtctacctgaattctcagaataaagaagagataaacaagcatttccaatccatagaagcgttctgcgatacatacaacatcactgcttcgaacgcaataacaagactggagaggggcataccaattacagcagaacatgcgatatccactaccacatcggctccctctggtgataataaacaaagttcttctagcgacaaaaagtttaatgctaaatacgtcgctgaggccactggtaatttcatcactgtaatggatgctttgaaactaaactataatgcaaaagatcaattacatcccttattggctgaactgttaatcagcataaatcgcgtcaccagggatgattttgagaatagatcaaaactcattgactggattgtcagaataaataaactctcaattggtgacactttaactgaaacacaaattagagaacttctgtttgatctagaactagcctataaaagtttttatgctttactggattaa

SEQ ID NO: 416 - protein, 242 aa, Saccharomyces cerevisiae
MQKHNIKLNQNQDISQLFHDEVPLFDNSITSKDKEVIETLSEIYSIVITLDHVEKAYLKDSIDDTQYTNTVDKLLKQFKVYLNSQNKEEINKHFQSIEAFCDTYNITASNAITRLERGIPITAEHAISTTTSAPSGDNKQSSSSDKKFNAKYVAEATGNFITVMDALKLNYNAKDQLHPLLAELLISINRVTRDDFENRSKLIDWIVRINKLSIGDTLTETQIRELLFDLELAYKSFYALLD

SEQ ID NO: 417 - DNA, 1701 bp, Saccharomyces cerevisiae
atggagtactggcattatgtggaaactacgtcatcgggccaacctcttcttcgagaaggtgaaaaagatatctttatcgatcagtccgtaggtctttaccatggcaaatctaagattctacagcgacagaggggcagaatctttttaacgtcacaaagaattatctacatcgacgatgcaaagcccactcagaactcgcttgggttggaattggacgatctagcgtatgtaaactattcatctggcttcttgaccagatcacctcgtctgatcctgtttttcaaggacccctccagtaaggatgaacttggtaaaagtgcggaaacagcaagtgccgacgttgtttcgacgtgggtctgccccatctgtatggtttcgaacgaaacgcagggggaattcactaaagacactctacctacacccatttgtatcaattgcggtgtgccagcggactatgagctcaccaagtcgtctataaattgttctaatgcaatcgacccgaacgccaacccacagaatcagttcggagtgaactctgagaacatttgccccgcctgtacttttgctaatcatcctcaaataggaaattgcgagatttgcggccacagattgcctaatgcatccaaagtacgatcaaagctgaacaggctaaactttcatgattctagggtccatattgagctagaaaaaaattcactggctagaaacaagagctcgcactcggcattatcgtcctcgtcctcgacaggatcatcgacagaattcgtgcaattgagtttccgcaaatctgatggcgtattgttttcacaagctacagagagggctttggagaatatactcactgaaaagaataagcatattttcaatcagaatgtggtttctgtaaatggtgtagacatgaggaaaggggctagttctcacgaatacaacaatgaggtgccatttattgagactaaattgagcagaattggcatatcaagcttggaaaaatctagagaaaaccagcttttgaacaatgacattctctttaacaatgcgttgaccgacctaaacaagctaatgtcgctggctaccagcatcgaaagactatacaaaaatagcaacataacgatgaaaaccaagacattgaacttacaggatgaatcaaccgtgaatgaaccgaaaacgagaagaccgctattgatacttgatagagagaagttcctaaataaagagctgttcttggatgagattgcgagagaaatttacgagttcacgttgtccgagtttaaagatttgaacagtgataccaactatatgatcataactctggtagatctatatgcaatgtacaacaaatctatgcgtataggtacaggcctgatatctcccatggaaatgagagaagcatgcgaaagattcgagcatttaggtctaaatgaattgaagttagtgaaagttaacaaaagaatattatgtgtaacgagcgaaaaattcgacgttgtaaaagaaaagctagtagatctgatcggtgataatcctggttctgatctcctaagattgacacagattttgagttccaataattcaaaatcaaactggacgctaggtatccttatggaggtattacaaaattgtgtcgatgaaggcgatttactgatagacaagcaactgagtgggatttactactataaaaactcttattggccctcgcatatataa

SEQ ID NO: 418 - protein, 566 aa, Saccharomyces cerevisiae
MEYWHYVETTSSGQPLLREGEKDIFIDQSVGLYHGKSKILQRQRGRIFLTSQRIIYIDDAKPTQNSLGLELDDLAYVNYSSGFLTRSPRLILFFKDPSSKDELGKSAETASADVVSTWVCPICMVSNETQGEFTKDTLPTPICINCGVPADYELTKSSINCSNAIDPNANPQNQFGVNSENICPACTFANHPQIGNCEICGHRLPNASKVRSKLNRLNFHDSRVHIELEKNSLARNKSSHSALSSSSSTGSSTEFVQLSFRKSDGVLFSQATERALENILTEKNKHIFNQNVVSVNGVDMRKGASSHEYNNEVPFIETKLSRIGISSLEKSRENQLLNNDILFNNALTDLNKLMSLATSIERLYKNSNITMKTKTLNLQDESTVNEPKTRRPLLILDREKFLNKELFLDEIAREIYEFTLSEFKDLNSDTNYMIITLVDLYAMYNKSMRIGTGLISPMEMREACERFEHLGLNELKLVKVNKRILCVTSEKFDVVKEKLVDLIGDNPGSDLLRLTQILSSNNSKSNWTLGILMEVLQNCVDEGDLLIDKQLSGIYYYKNSYWPSHI

SEQ ID NO: 419 - DNA, 1734 bp, Saccharomyces cerevisiae
atgaacctttttgatgtggctgacttttatataaacaaaattgtgacttcccaatcgaaattgagcgtagccaatgtcaatgaacaccaaaggattaaggttttgctgttggataagaataccacacctacgatatccttatgtgccactcaaagtgagttgttgaagcatgaaatatatctggtagaaagaatagaaaatgagcaacgtgaagtgtccaggcatttaaggtgcttagtttacgttaaacccacagaggaaacactgcaacatctgctgcgtgagttaagaaatcctcggtacggcgagtatcaaatattctttagtaatattgtctctaaatctcaattagaacggctagctgaatctgacgacttggaagctgttactaaggtggaagaaatattccaagacttttttatattaaaccaagatttattttcgtttgatttgcaaccaagagaatttttaagtaataaattggtttggagcgaaggggggctaacaaaatgtaccaacagcttagtttctgtgcttttatccttaaagataaaaccagatatcaggtatgaaggagcaagtaaaatttgtgaaagattggctaaagaagtttcctatgagattggtaaaaacgaaagaactttttttgattttcctgtgatggattcgacacctgtgttactaattttagatcgtaatactgatcctataacacctttacttcaaccttggacctaccaatcaatgatcaatgagtatataggcattaagcggaatatagttgatttatcgaaagtgcctagaattgataaagacctggagaaggtcaccttatcatcaaagcaagatgctttcttcagggataccatgtatttgaattttggtgaattgggtgataaagtaaaacaatatgtgactacatacaaagacaagacacaaaccaacagccaaataaattccattgaggatattaaaaactttattgagaagtatccagagtttagaaaattatctggaaatgttgcaaagcatatggctatagtgggggaattagacagacagttgaagataaaaaatatatgggaaattagtgaaatagaacaaaatctatcagcacacgatgccaatgaagaagatttctccgatttgattaaattgctacaaaatgaagcagttgataagtattacaagttaaagcttgcatgtatttattctttaaacaatcaaaccagctcagacaaaatccgtcaactagttgagattctgtctcaacaacttcctccagaggacgtcaactttttccataaatttaaatcgctttttagccgccaggataaaatgactcaaagtaaccatgacaaggacgatatattaaccgaactagcaagaagatttaatagtagaatgaattctaagagcaacaccgctgaaaacgtctatatgcaacatattccggaaatttcgtcattactaacagatctctctaaaaatgcgttattcagggatcgtttcaaagaaatagatactcaaggccatagagtgatcggaaaccagcagagcaaagatattcctcaggatgtaatattgtttgttattggcggtgtaacttatgaggaggcaaggctagtccatgatttcaatggaacgatgaataacagaatgagggtggttttaggaggcacctctatactttcaactaaagaatatatggattctattagatctgcaaaataa

SEQ ID NO: 420 - protein, 577 aa, Saccharomyces cerevisiae
MNLFDVADFYINKIVTSQSKLSVANVNEHQRIKVLLLDKNTTPTISLCATQSELLKHEIYLVERIENEQREVSRHLRCLVYVKPTEETLQHLLRELRNPRYGEYQIFFSNIVSKSQLERLAESDDLEAVTKVEEIFQDFFILNQDLFSFDLQPREFLSNKLVWSEGGLTKCTNSLVSVLLSLKIKPDIRYEGASKICERLAKEVSYEIGKNERTFFDFPVMDSTPVLLILDRNTDPITPLLQPWTYQSMINEYIGIKRNIVDLSKVPRIDKDLEKVTLSSKQDAFFRDTMYLNFGELGDKVKQYVTTYKDKTQTNSQINSIEDIKNFIEKYPEFRKLSGNVAKHMAIVGELDRQLKIKNIWEISEIEQNLSAHDANEEDFSDLIKLLQNEAVDKYYKLKLACIYSLNNQTSSDKIRQLVEILSQQLPPEDVNFFHKFKSLFSRQDKMTQSNHDKDDILTELARRFNSRMNSKSNTAENVYMQHIPEISSLLTDLSKNALFRDRFKEIDTQGHRVIGNQQSKDIPQDVILFVIGGVTYEEARLVHDFNGTMNNRMRVVLGGTSILSTKEYMDSIRSAK

SEQ ID NO: 421 - DNA, 1986 bp, Saccharomyces cerevisiae
atgcaaagttcagtttattttgaccaaacagggtcatttgcgtccagtagcgacaacgttgtgtctagtaccaccaacacacacaacatttctcccagtcatcgttccagtttgaatctgaacactacttctcatccccacgaagcgtcgggtagaggaagcgcaagtggggagttgtatttgaatgacacaaactcacccttagcgatatcttctatgctaaacacacttgcccttggaagtatgccccaagacattgcaagcagcaacattagcaatcacgataacaacattaaggggagctacagcctaaaattgtcaaatgtagccaaggatattactctcagagaatgctatgcaatcttcgctcttgctgaaggtgtgaaaagtatagaattacagaaaaaaaactcttcatcaagcatcacttctgcctcattagaagacgagaatgatatttttatcattgccagatttgagttattgaatctagctattaattatgccgttattttgaattcgaaaaatgaactctttggacccagttttcccaataaaacaaccgttgaaataatagatgacacaacaaaaaacttggtttcattcccatcatctgccattttcaatgacacctcaagattgaataaatcgaactcgggaatgaaaaggccaagtctgttatcacaaagatccaggttttcattcagcgatccattttccaatgattctcctttaagccaacagcaatctcaacagcagcagcaacagccacaacagccacaacaacactctacgcaaaaacattcaccacaacaatgtaatcaacaacaagtgaattcttcaataccgttatcttctcaaggccaggttattgggttacattctaaccattcacatcaagatttgtctgtggaatcaacaattcaaacatctgatattggcaaatctttccttttgagagataacactgaaattaatgaaaagatatggggcacaagcggtataccttccagcatcaacggttacatgagcactccccaaccttctacgccaactttagaatggggaaatacttctgcatcccaacatggttcttcgttctttttaccctctgcagcatcgacagccattgcacctacgaatagcaacaccagtgccaatgcaaacgccagctccaacaatggagccagcaataatggtgctaaccaggcactctctgccagctcgcaacaaccaatgatgcaaattggtaacacgattaacacttccctaacctcttcaaattcattgcctccatacggtttaatgtcttctcaatcgcagcacatttcaaatatggtaaacacctctgatatgaacattacacctcaaaaacagaacagatttatgcaacaaccccaaccagagcatatgtatcctgtgaatcaaagtaacactcctcaaaaagtaccgcccgcaagattaagttcaagtagaaattcacacaagaataactctactacctcattatcctcaaatattactggatctgcctcgatttctcaggctgatttgtcactactagccagaattccacctcctgccaaccctgctgatcaaaatccaccttgtaataccctttatgtagggaatttaccctccgacgctactgagcaagaactaagacagctattttctggtcaagaaggcttcagaagactatcattcaggaataagaataccacatctaatggtcatagtcacggaccgatgtgcttcgttgaattcgatgatgtcagttttgcaaccagagcgttagctgaattgtatggtagacagttacctcgctccactgtgagcagtaagggaggtatcagattaagcttttcaaaaaacccactgggtgttaggggcccaaacagcagaagaggaggcagtggtaacccaaatcctaatgtaaatatgctttccagttacaattctaatgttggtcatataaaaaactaa

SEQ ID NO: 422 - protein, 661 aa, Saccharomyces cerevisiae
MQSSVYFDQTGSFASSSDNVVSSTTNTHNISPSHRSSLNLNTTSHPHEASGRGSASGELYLNDTNSPLAISSMLNTLALGSMPQDIASSNISNHDNNIKGSYSLKLSNVAKDITLRECYAIFALAEGVKSIELQKKNSSSSITSASLEDENDIFIIARFELLNLAINYAVILNSKNELFGPSFPNKTTVEIIDDTTKNLVSFPSSAIFNDTSRLNKSNSGMKRPSLLSQRSRFSFSDPFSNDSPLSQQQSQQQQQQPQQPQQHSTQKHSPQQCNQQQVNSSIPLSSQGQVIGLHSNHSHQDLSVESTIQTSDIGKSFLLRDNTEINEKIWGTSGIPSSINGYMSTPQPSTPTLEWGNTSASQHGSSFFLPSAASTAIAPTNSNTSANANASSNNGASNNGANQALSASSQQPMMQIGNTINTSLTSSNSLPPYGLMSSQSQHISNMVNTSDMNITPQKQNRFMQQPQPEHMYPVNQSNTPQKVPPARLSSSRNSHKNNSTTSLSSNITGSASISQADLSLLARIPPPANPADQNPPCNTLYVGNLPSDATEQELRQLFSGQEGFRRLSFRNKNTTSNGHSHGPMCFVEFDDVSFATRALAELYGRQLPRSTVSSKGGIRLSFSKNPLGVRGPNSRRGGSGNPNPNVNMLSSYNSNVGHIKN

SEQ ID NO: 423 - DNA, 1512 bp, Saccharomyces cerevisiae
atgcacctagatctcatacacaagtccttcatcttagtgtggctcatatatatacgagccgcgttggctgaccaattcacatataaagcttgctattcagctagtgatatacgaaaattggggttgacttacaagggtgtttacgagtatcaatcagtttcctactgtcaaaatgaatgccctggtcaggctgtcgttgctcttttcaacggtacaggttgctactgtggtggttccgtagctcagttacagtctttgacgcaggtagattcgagcaaatgtgatgtttcgtgtgctggctggccctaccaaaattgtggtggttcttctgccatgaacgtttatatcaataacgctgcttctaccgcggactcaacttcatctactgctacctcaacatcgacaacatcttcatcaagcacaagtgttagttcaaaaacgtccacgaaattggacacgaaaacttcaactagttcttctgctacgcactcatcctcttcctcgtctacaacctccactaccacttcctcttcagagacaactacttcctcctcttcttcatcctcttcctcttctacgtctactacttctactacttctactacctctagtactacttctacttcttcttctccttccaccacttcctctagcacttctgcctcttccagttcagaaacgtcctctacgcaggcaacttcttcatccaccacatcgacctcatcctcaacttcgacagcaacggtcacttctaccccctcatcgacttcaataggtacttccacgcattacactacccgtgtggtgacgcagtccgtggtttctcaagctaaccaacaagcaagcacgatctttaccaccaggacctctgtttatgcaacagtatcgtctacgtcctcctctactagttctctcttaaacgggaaatcgagctcgtccaagagcaaaggcttgagtggtggcgccatcgcaggtgtcgtagtaggtgtggtttgtggtacagttgccttgttggctctggcgttattctttttcgtatggaaaaaacgtcgccaatcttctcagcatgtggacttggaagagacaaagcagtaccagccgtactcactgggtgatgctgacgctaaccctgttattccaccgtctgcttcgagcactaactggcacataccctctaggaataatacagcattgtccaagaatacagcgtctacttttgccacttatgatctgccgacaagggcgccgggcggcagagattctattattactggtgatgcacataatatcagcaaaagaagtcactttccctcggtagtgtacgaggagcctccttcgatctataacgggaaccaaaggttcagtgctacttcgctgcccgatatgatggaagaaagacaactacacattgtcaaccccgataatgtgagttcaaatattgggagtaatgtctcagatggtgatgatgattacgatgatgcaaaggattccaataatagttctttgcgctga

SEQ ID NO: 424 - protein, 503 aa, Saccharomyces cerevisiae
MHLDLIHKSFILVWLIYIRAALADQFTYKACYSASDIRKLGLTYKGVYEYQSVSYCQNECPGQAVVALFNGTGCYCGGSVAQLQSLTQVDSSKCDVSCAGWPYQNCGGSSAMNVYINNAASTADSTSSTATSTSTTSSSSTSVSSKTSTKLDTKTSTSSSATHSSSSSSTTSTTTSSSETTTSSSSSSSSSSTSTTSTTSTTSSTTSTSSSPSTTSSSTSASSSSETSSTQATSSSTTSTSSSTSTATVTSTPSSTSIGTSTHYTTRVVTQSVVSQANQQASTIFTTRTSVYATVSSTSSSTSSLLNGKSSSSKSKGLSGGAIAGVVVGVVCGTVALLALALFFFVWKKRRQSSQHVDLEETKQYQPYSLGDADANPVIPPSASSTNWHIPSRNNTALSKNTASTFATYDLPTRAPGGRDSIITGDAHNISKRSHFPSVVYEEPPSIYNGNQRFSATSLPDMMEERQLHIVNPDNVSSNIGSNVSDGDDDYDDAKDSNNSSLR

SEQ ID NO: 425 - DNA, 1671 bp, Saccharomyces cerevisiae
atggaaagagtatggtttgcaaaattaacaaataaaggaactattaaaatcgggtatatctcatttatacttctaagtttgctatgtcaatctctgattgggctggttaatgctgattttaattatgaaggctgttacagtgccgcggatatccagtctgctggactgtctctgaaaaactcatacatatatcaatcagtgtcatactgtcaaaaccagtgccctgagtcagcagtagtagcattatttaacgggtcagattgttactgcggtaattcggtaagttttctgacttctttgacgaaatcaacagattcaaactgtggaactaaatgctctggctggccttaccaaatgtgtggagggtcatcgtacatgaacgtgtatgtaaatgctgaaacttttgtttcatcggttgaatcttcctcttccaaagaagggtctagcacttcctatatgccctcaacaacttcttcattgtcctccgcccaaatttcttcaactactaggagaacgtcaacagatatgaaaagttctgaaatgatagccacgacagtttctaccacttcaacaacctcttcctcgacttcctctactacctcttctaccacctcttctaccacctcttctaccacctcttctactacctcttcctcgacttcctctactacctcttctaccacctcttctaccacctcttctaccacctcttctaccacctcttctactacctcttctactacctcctctactacctcctctactacctctatcttttctgttacgtctagctcctcatccattacattgtcctcatctgagcataccacagtcgatagccgtacttcttcaccctcttccaccttggtgccagtgtcctcgagtagcagcacactatcaactccaaaagtgacctcaatgacccctagtacgtcatcaacgataccaatagttacctcagtggaactagtgactagtgtggttacaaaagcgatcgtgagtacttctgatcaacatcaggaaacaatatttgttacgaggacatccgtggttgaacgatcttctgaggtagctactgctactgctgccgcctcaaataatagatctaattcgacttcgaagcagcgtctgagtggtggagccattgccggtattgttattggtgttgtgtttggcgtaatttttattattttgattctattgttcctgatatggaggagacggaaatcgcacgaccaattagacttggaggaaacgaaacattatcagccctattcgttcggtgatgaggatgcaaatccaataggaccgcctccctcctctggtacgacaaattggatgagacattcaaggggtaatacagcgggttctatcggtacaagtaatatgtatggtttttctatgagtaatggtgcaaattatagtagtcctagttcaaacaccagtggaagcatcataaacaacttggctggcttacaagatgctacggttcagaaacagaaccttccatcgacagtttttgaagaggcaaatactttgaatagtgcaaatgaaaggttcagtgccaattctttacccgacatgatgatgagcggaccattgcaagtggtaaaccctgataatcctgataatcctgaattatctagtaccgtatctcataatcgagcctga

SEQ ID NO: 426 - protein, 556 aa, Saccharomyces cerevisiae
MERVWFAKLTNKGTIKIGYISFILLSLLCQSLIGLVNADFNYEGCYSAADIQSAGLSLKNSYIYQSVSYCQNQCPESAVVALFNGSDCYCGNSVSFLTSLTKSTDSNCGTKCSGWPYQMCGGSSYMNVYVNAETFVSSVESSSSKEGSSTSYMPSTTSSLSSAQISSTTRRTSTDMKSSEMIATTVSTTSTTSSSTSSTTSSTTSSTTSSTTSSTTSSSTSSTTSSTTSSTTSSTTSSTTSSTTSSTTSSTTSSTTSIFSVTSSSSSITLSSSEHTTVDSRTSSPSSTLVPVSSSSSTLSTPKVTSMTPSTSSTIPIVTSVELVTSVVTKAIVSTSDQHQETIFVTRTSVVERSSEVATATAAASNNRSNSTSKQRLSGGAIAGIVIGVVFGVIFIILILLFLIWRRRKSHDQLDLEETKHYQPYSFGDEDANPIGPPPSSGTTNWMRHSRGNTAGSIGTSNMYGFSMSNGANYSSPSSNTSGSIINNLAGLQDATVQKQNLPSTVFEEANTLNSANERFSANSLPDMMMSGPLQVVNPDNPDNPELSSTVSHNRA

SEQ ID NO: 427 - DNA, 1818 bp, Saccharomyces cerevisiae
atgcagacgtcaatggtgagcgcaaaagttagtatatggctagtatgtagcgttatatgcagtagcctggtacgggctacgcaatctgtgtgttcgtcgcaaaacacagcgaccactgacggtgtacgaaatcaatttcagagtaatggttggtgttcaaataactgtgctggtcatcagtttgccatcgtacaggggttcatgtgctggtgcagtgattcggaaccgagcactcagacatcggtgggagactgcagtggcacttgtcccggttatggctacgaagattgtggtaatgcggataaggatctttttggttatatatatctggggcaaaccccgctaagttctgtacagagtgtggaaacgtcaacagagtccagtgtgtacgtttcaagtagctctatcacgagtagtagtagtacgagtattgtggacacaaccacaatctcgccgactctgacgtcaacgagtacgaccccattgacaaccgcctcaaccagtacaacaccatcaactgatataacatcggcactgcccacgactacaagcacaaagttgtcaacatccattcccacaagcacgacatcgtcaacctctaccaccacaagtacctcatcgtcgacttctacgaccgtaagtgtcacatcatcaacatctaccaccacaagtactacgtcgtcaaccctcatttccacgagcacatcatcatcatcatcatcaactccaaccacaacatcgtcagcccccatttctacaagcacgacgtcgtcaacttccacttcaacaagtacaacatcgccaacttcttcttcagcacctacaagctcgtctaatacaacaccaacgagcacaacgttcactacgacatcacccagtacagccccttcaagcactacggttacttacaccagtaccacagcatctccaataacgtccactataacttctgtaaacctgcagacctccttaaagtattctgtgataacagtgacttcagtgcacaccatggacactaacatttcggaaatcacctcgagatatctcaccatgaaaaaagtaataacgcagatttactcttccaccctcggggctactcctacttctgcagtggctactacgtctgccagcgtaggtggtagaataacaaacaataacaatagtaacaccaccaacagcaatacaccaactaacaagtctacagaaaagaaagggtactgggattcgcccgggaaaatagccgctactttcgtcgtggttggagtggtatgtttggtaattatatgcatactaatatacttaatacatcattatagaacaagacccgctcggaaggctcaagattttgagaatgaatatcagagtaagttttaccagtccaagtacccaaatgaagttaccactaccacgttacacacgccttcaccatcttcaaattcaactttctcgaccccaagattaatatacactgatgaaaagggacaaattatgtctgaatcaccatccccacgtcaatctacgtattccttgactgcaggcagtccaccaaatgacccaagcacgttggcaagcccatttcacgatcccattcttcccagaagaacttctacttttcttcattcgcccattcaaaagcaacacgaaaaaatggaatcaaacgttactctaggtgaagacacggtactggtggatcagaggctagacccaagtaagatgcttaacactttagcaaatgacgatgccacaaaccactctaccatttcgttatcagacaacgtagactactccaggagggttctgcggctaatgaacgaataa

SEQ ID NO: 428 - protein, 605 aa, Saccharomyces cerevisiae
MQTSMVSAKVSIWLVCSVICSSLVRATQSVCSSQNTATTDGVRNQFQSNGWCSNNCAGHQFAIVQGFMCWCSDSEPSTQTSVGDCSGTCPGYGYEDCGNADKDLFGYIYLGQTPLSSVQSVETSTESSVYVSSSSITSSSSTSIVDTTTISPTLTSTSTTPLTTASTSTTPSTDITSALPTTTSTKLSTSIPTSTTSSTSTTTSTSSSTSTTVSVTSSTSTTTSTTSSTLISTSTSSSSSSTPTTTSSAPISTSTTSSTSTSTSTTSPTSSSAPTSSSNTTPTSTTFTTTSPSTAPSSTTVTYTSTTASPITSTITSVNLQTSLKYSVITVTSVHTMDTNISEITSRYLTMKKVITQIYSSTLGATPTSAVATTSASVGGRITNNNNSNTTNSNTPTNKSTEKKGYWDSPGKIAATFVVVGVVCLVIICILIYLIHHYRTRPARKAQDFENEYQSKFYQSKYPNEVTTTTLHTPSPSSNSTFSTPRLIYTDEKGQIMSESPSPRQSTYSLTAGSPPNDPSTLASPFHDPILPRRTSTFLHSPIQKQHEKMESNVTLGEDTVLVDQRLDPSKMLNTLANDDATNHSTISLSDNVDYSRRVLRLMNE

SEQ ID NO: 429 - DNA, 1953 bp, Saccharomyces cerevisiae
atgagtgtgtctaccgccaagaggtcgctggatgtcgtttctccgggttcattagcggagtttgagggttcaaaatctcgtcacgatgaaatagaaaatgaacatagacgtactggtacacgtgatggcgaggatagcgagcaaccgaagaagaagggtagcaaaactagcaaaaagcaagatttggatcctgaaactaagcagaagaggactgcccaaaatcgggccgctcaaagagcttttagggaacgtaaggagaggaagatgaaggaattggagaagaaggtacaaagtttagagagtattcagcagcaaaatgaagtggaagctacttttttgagggaccagttaatcactctggtgaatgagttaaaaaaatatagaccagagacaagaaatgactcaaaagtgctggaatatttagcaaggcgagatcctaatttgcatttttcaaaaaataacgttaaccacagcaatagcgagccaattgacacacccaatgatgacatacaagaaaatgttaaacaaaagatgaatttcacgtttcaatatccgcttgataacgacaacgacaacgacaacagtaaaaatgtggggaaacaattaccttcaccaaatgatccaagtcattcggctcctatgcctataaatcagacacaaaagaaattaagtgacgctacagattcctccagcgctactttggattccctttcaaatagtaacgatgttcttaataacacaccaaactcctccacttcgatggattggttagataatgtaatatatactaacaggtttgtgtcaggtgatgatggcagcaatagtaaaactaagaatttagacagtaatatgttttctaatgactttaattttgaaaaccaatttgatgaacaagtttcggagttttgttcgaaaatgaaccaggtatgtggaacaaggcaatgtcccattcccaagaaacccatctcggctcttgataaagaagttttcgcgtcatcttctatactaagttcaaattctcctgctttaacaaatacttgggaatcacattctaatattacagataatactcctgctaatgtcattgctactgatgctactaaatatgaaaattccttctccggttttggccgacttggtttcgatatgagtgccaatcattacgtcgtgaatgataatagcactggtagcactgatagcactggtagcactggcaataagaacaaaaagaacaataataatagcgatgatgtactcccattcatatccgagtcaccgtttgatatgaaccaagttactaatttttttagtccgggatctaccggcatcggcaataatgctgcctctaacaccaatcccagcctactgcaaagcagcaaagaggatataccttttatcaacgcaaatctggctttcccagacgacaattcaactaatattcaattacaacctttctctgaatctcaatctcaaaataagtttgactacgacatgttttttagagattcatcgaaggaaggtaacaatttatttggagagtttttagaggatgacgatgatgacaaaaaagccgctaatatgtcagacgatgagtcaagtttaatcaagaaccagttaattaacgaagaaccagagcttccgaaacaatatctacaatcggtaccaggaaatgaaagcgaaatctcacaaaaaaatggcagtagtttacagaatgctgacaaaatcaataatggcaatgataacgataatgataatgatgtcgttccatctaaggaaggctctttactaaggtgttcggaaatttgggatagaataacaacacatccgaaatactcagatattgatgtcgatggtttatgttccgagctaatggcaaaggcaaaatgttcagaaagaggggttgtcatcaatgcagaagacgttcaattagctttgaataagcatatgaactaa

SEQ ID NO: 430 - protein, 650 aa, Saccharomyces cerevisiae
MSVSTAKRSLDVVSPGSLAEFEGSKSRHDEIENEHRRTGTRDGEDSEQPKKKGSKTSKKQDLDPETKQKRTAQNRAAQRAFRERKERKMKELEKKVQSLESIQQQNEVEATFLRDQLITLVNELKKYRPETRNDSKVLEYLARRDPNLHFSKNNVNHSNSEPIDTPNDDIQENVKQKMNFTFQYPLDNDNDNDNSKNVGKQLPSPNDPSHSAPMPINQTQKKLSDATDSSSATLDSLSNSNDVLNNTPNSSTSMDWLDNVIYTNRFVSGDDGSNSKTKNLDSNMFSNDFNFENQFDEQVSEFCSKMNQVCGTRQCPIPKKPISALDKEVFASSSILSSNSPALTNTWESHSNITDNTPANVIATDATKYENSFSGFGRLGFDMSANHYVVNDNSTGSTDSTGSTGNKNKKNNNNSDDVLPFISESPFDMNQVTNFFSPGSTGIGNNAASNTNPSLLQSSKEDIPFINANLAFPDDNSTNIQLQPFSESQSQNKFDYDMFFRDSSKEGNNLFGEFLEDDDDDKKAANMSDDESSLIKNQLINEEPELPKQYLQSVPGNESEISQKNGSSLQNADKINNGNDNDNDNDVVPSKEGSLLRCSEIWDRITTHPKYSDIDVDGLCSELMAKAKCSERGVVINAEDVQLALNKHMN

SEQ ID NO: 431 - DNA, 666 bp, Saccharomyces cerevisiae
atgggccaaaaaagtagtaaagtgcatataaccaaaacagatagggcgatcctagaagtaaaacgatctaaagatgaaattcataagtttacgaggaggacagataatttgattttggtagagaagagtcaactaaaagacctaatacgaaaaaatcctgaaaattataaatctaacatgaaggtacgatttctactaaaaagaattcattatcaggagcatttgttgcagcaggcttcggatcagcttattaatttggaaaatatggtgtcaacacttgagttcaaaatggtagaaaagcaatttattaatggactgaaaaatggaaatgaaatcttgaaaaaactaaacaaggaatttagcaatgttgatgaactgatggacgatgtacaagatcaaattgcgtatcaaaatgaaattaacgagacattatctagaagcttagtcggaacaagcaattatgaagacgatctagataaggaattggatgctctagaaagtgaactcaatccagagaagatgaataacgcaaaagtagctaacatgccatcaacagaaggtttgccatcattgcctcaaggagaacaaaccgagcaaaaagaaagagaggaattcgcgacggaggagagatcagacactaaggaacctttagcattactatcctga

SEQ ID NO: 432 - protein, 221 aa, Saccharomyces cerevisiae
MGQKSSKVHITKTDRAILEVKRSKDEIHKFTRRTDNLILVEKSQLKDLIRKNPENYKSNMKVRFLLKRIHYQEHLLQQASDQLINLENMVSTLEFKMVEKQFINGLKNGNEILKKLNKEFSNVDELMDDVQDQIAYQNEINETLSRSLVGTSNYEDDLDKELDALESELNPEKMNNAKVANMPSTEGLPSLPQGEQTEQKEREEFATEERSDTKEPLALLS

SEQ ID NO: 433 - DNA, 462 bp, Saccharomyces cerevisiae
atgtctcaaaaagcttgttacgtttgcggtaagattggccatttggcagaagactgtgattctgaaagactatgttacaactgtaacaaacccggtcacgttcaaacggattgtaccatgccaagaacagttgaattcaagcaatgttacaattgtggtgaaaccggtcacgttagaagtgaatgtactgtgcaacgttgtttcaactgtaaccaaaccggccacatctccagagaatgccctgaaccaaagaagaccagcagattctccaaagtttcatgttataaatgtggtggtccaaaccatatggctaaggactgtatgaaagaggacggaattagtggattgaaatgttacacttgtggtcaagctggccacatgtccagggactgtcaaaatgacaggctttgttacaactgtaacgaaactggccatatttccaaggattgtccaaaggcttag

SEQ ID NO: 434 - protein, 153 aa, Saccharomyces cerevisiae
MSQKACYVCGKIGHLAEDCDSERLCYNCNKPGHVQTDCTMPRTVEFKQCYNCGETGHVRSECTVQRCFNCNQTGHISRECPEPKKTSRFSKVSCYKCGGPNHMAKDCMKEDGISGLKCYTCGQAGHMSRDCQNDRLCYNCNETGHISKDCPKA

SEQ ID NO: 435 - DNA, 504 bp, Saccharomyces cerevisiae
atgtctactattccctcagaaatcatcaattggaccatcttaaatgaaattatatctatggatgacgatgattccgatttttctaaaggtctaattattcaatttatcgaccaggcacaaacaacttttgctcaaatgcaacgacagctggacggtgaaaaaaatcttaccgaattagacaatctgggccattttttaaagggttcttctgctgcattaggcttacaaagaattgcctgggtttgtgaaagaattcaaaacttgggaagaaaaatggaacatttcttccccaacaagaccgaattggtcaacactctgagcgataaatcgattattaatggaatcaatattgatgaagatgacgaggaaataaagatacaagtggacgataaagacgaaaattccatatatctcatcttgatagcaaaagctttgaaccagtctaggttggagttcaaactggcgagaattgagttatctaaatattacaacacaaacctataa

SEQ ID NO: 436 - protein, 167 aa, Saccharomyces cerevisiae
MSTIPSEIINWTILNEIISMDDDDSDFSKGLIIQFIDQAQTTFAQMQRQLDGEKNLTELDNLGHFLKGSSAALGLQRIAWVCERIQNLGRKMEHFFPNKTELVNTLSDKSIINGINIDEDDEEIKIQVDDKDENSIYLILIAKALNQSRLEFKLARIELSKYYNTNL

SEQ ID NO: 437 - DNA, 939 bp, Saccharomyces cerevisiae
atgcctgctacgttaaagaattcttctgctacattaaaactaaatactggtgcctccattccagtgttgggtttcggcacttggcgttccgttgacaataacggttaccattctgtaattgcagctttgaaagctggatacagacacattgatgctgcggctatctatttgaatgaagaagaagttggcagggctattaaagattccggagtccctcgtgaggaaatttttattactactaagctttggggtacggaacaacgtgatccggaagctgctctaaacaagtctttgaaaagactaggcttggattatgttgacctatatctgatgcattggccagtgcctttgaaaaccgacagagttactgatggtaacgttctgtgcattccaacattagaagatggcactgttgacatcgatactaaggaatggaattttatcaagacgtgggagttgatgcaagagttgccaaagacgggcaaaactaaagccgttggtgtctctaatttttctattaacaacattaaagaattattagaatctccaaataacaaggtggtaccagctactaatcaaattgaaattcatccattgctaccacaagacgaattgattgccttttgtaaggaaaagggtattgttgttgaagcctactcaccatttgggagtgctaatgctcctttactaaaagagcaagcaattattgatatggctaaaaagcacggcgttgagccagcacagcttattatcagttggagtattcaaagaggctacgttgttctggccaaatcggttaatcctgaaagaattgtatccaattttaagattttcactctgcctgaggatgatttcaagactattagtaacctatccaaagtgcatggtacaaagagagtcgttgatatgaagtggggatccttcccaattttccaatga

SEQ ID NO: 438 - protein, 312 aa, Saccharomyces cerevisiae
MPATLKNSSATLKLNTGASIPVLGFGTWRSVDNNGYHSVIAALKAGYRHIDAAAIYLNEEEVGRAIKDSGVPREEIFITTKLWGTEQRDPEAALNKSLKRLGLDYVDLYLMHWPVPLKTDRVTDGNVLCIPTLEDGTVDIDTKEWNFIKTWELMQELPKTGKTKAVGVSNFSINNIKELLESPNNKVVPATNQIEIHPLLPQDELIAFCKEKGIVVEAYSPFGSANAPLLKEQAIIDMAKKHGVEPAQLIISWSIQRGYVVLAKSVNPERIVSNFKIFTLPEDDFKTISNLSKVHGTKRVVDMKWGSFPIFQ

SEQ ID NO: 439 - DNA, 2643 bp, Saccharomyces cerevisiae
atggatgcgttgactcccagggactcccccaagcgcgatgactcgatggccacgagtgcggccactgctgcttctgccaagcctgatgctctgacgataggtaaagaaggcattgtccacgggcacatccataactacaacaacctgacctatatccatggtcaccttcaccacagcgcgcctgtgaacgacagtagtgcttcggcaacacctgcagccgcagctgttgctgatgccgctacttccgcatttgcatctggagctagccatgatatgggtggtgattgccacgtcaatgagaaatgcaaggagtacaccgactgccaacatttcgagttcttgaattatcacaataatccgtcattaacaaaatataatgatactgcaacgtataattctaataatcattcttttgcaaacaatttccattcggtagcttctgatccgacaagtccccaacagaattctaaaagcgacctaccacgtagaaaagattcttggtttaacgacgatctgatactgctgccctcttccaagaaaaataaaccgaacccaccacctggatccgatgattgttattgtacgcccaagattttggaaatatgttgtgacgaaactcatcccaaaagtgaggctaatataaaacaaggtgaatctgatcaaccgacaaagaaagacatatctgagaacggcaatgatgttgcaatattcacagatgtaaagaacgatcacttgatgccaaattttaaccttcatgatcagtactgtaatagtaccaatcacgactctcacaatcacaataatactgtaccagatagcttttctcagctgatgtctcacttatcggagattgattgcgatttgacctgtgacaccccatgcacggctagcacgagcgcgactagtggtcacaagtttgttcaagatcatcaatcatcaaataatgatgacgttttccataaatactgcaaattttgtgaggagagcactgataatcaaccttgttctaagcatatgcatttagagtcaaagccacctcaactaccacccaaatgttcatctttacgaaaacctacaaacactttgcaaggtacaaatcatgcttatcacgaacatatcttaaatactgatatggatttgaagattttggaagatttatgcaatatttcttctttgtatgaagtaccgtttggaaaacacattaaccaccacgaccacaataatgccggtaacggctgcgatggttcgagcacaggaaataatgaaaacggtaaccaaacaatgaatcttctattatcaagcattaatagatgcaaccctaaaaataatcttaatggaagcaataacaatacggctggagcaacttcaactgatcatcaacaccatcaccatagaatacagtttcattctcacaaaccaaatagaaacaatattgtgaacaattcagggattagcgcggcgaacacaacagccgatctaactaacaacgatttaaatgacttaatttcaagagagtatagttatgaaagatttagaaatcaaagtgagcccccttcgctacccaaagtcactcatcagaatcagaaaaatcgtagatcttggcctacaaaagatctagaatctactgatttcagctctttggaagactcattaccttctagcatctctcctcctatacagacaacaagcactataaatttcaactggtgttttaaagaagagaaaaacaatgacttaaaatgcaaatggaaagaatgtcctgagtcttgtagctcactatttgacctacaaagacatcttttgaaggatcatgtctctcaagatttcaaacaccctatggaaccattagcttgtaattgggaggactgtgatttccttggagatgatacatgttccatagtgaaccatattaattgtcaacatggtatcaattttgatattcaatttgccaacccagactcatttttgcctggtagtatatcaaaggaaaaacatcacttactacattgccccaacccacaaacacacgaagtttctaaagcagatggagcacctgatatgacgtctgcaaatgatgtttccaatataccgccaatcaagcagccggaacaggtgatttgccaatgggatggttgcaataagtcattttccagtgctcaggaattaaacgaccatttagaagcagtacatttaacccggggtaagtctgaataccaatgcttgtggcatgactgccatcgtacgttcccccaaagacaaaaattaatccgtcatttaaaagtgcattcgaaatacaaaccttataagtgcaagacatgtaaaaggtgtttttcaagcgaagaaactttagttcagcataccaggacacactctggcgaaaaaccttacaaatgtcacatttgtaataaaaaattcgcgatttcaagttctttgaagattcatataagaacccatactggtgaaaaacctttacaatgcaagatttgtggtaagagattcaacgaatcgtcaaatttgagcaaacatattaagacccatcagaaaaaatacaagtgctctgactgttccaaaagctttgacgatttgggaaaattgaactcacagaaagtgaaatgcgcattggaaagaaaaccatatttataa

SEQ ID NO: 440 - protein, 880 aa, Saccharomyces cerevisiae [sequence omitted]

SEQ ID NO: 441 - DNA, 20 bp, Artificial Sequence
  Primer
gtgcctgtagtaagacatgt

SEQ ID NO: 442 - DNA, 20 bp, Artificial Sequence
  Primer
acatgtcttactacaggcac

SEQ ID NO: 443 - DNA, 20 bp, Artificial Sequence
  Primer
gtaaagtgaatttgagaaac

SEQ ID NO: 444 - DNA, 20 bp, Artificial Sequence
  Primer
gtttctcaaattcactttac

SEQ ID NO: 445 - DNA, 24 bp, Artificial Sequence
  Primer
tggtgtcggtaattcctgcttaac

SEQ ID NO: 446 - DNA, 24 bp, Artificial Sequence
  Primer
gttaagcaggaattaccgacacca
